(19) United States
(12) Patent Application Publication
(10) Pub. No.: US 2014/0357512 A1
(43) Pub. Date: Dec. 4, 2014

(54) HISTONE DEACETYLASE (HDAC) BIOMARKERS IN MULTIPLE MYELOMA

(71) Applicant: ACETYLON PHARMACEUTICALS, INC., Boston, MA (US)

(72) Inventors: Min Yang, Boston, MA (US); Simon S. Jones, Boston, MA (US)

(73) Assignee: ACETYLON PHARMACEUTICALS, INC., Boston, MA (US)

(21) Appl. No.: 14/294,833

(22) Filed: Jun. 3, 2014

Related U.S. Application Data
(60) Provisional application No. 61/830,371, filed on Jun. 3, 2013.

(51) Int. Cl. G01N 33/574; G01N 33/50

(52) U.S. Cl. CPC G01N 33/57407; G01N 33/57496; G01N 33/5011; G01N 2333/98; G01N 2500/02
USPC 506/9; 530/328; 530/326; 530/327; 530/324; 435/7.1

(57) ABSTRACT

The invention relates to histone deacetylase (HDAC) biomarkers in multiple myeloma. Specifically, the biomarkers are drug specific, histone deacetylase (HDAC) or HDAC6 biomarker peptides, which are acetylated, for multiple myeloma. Alternatively, the biomarkers are drug specific, HDAC6 biomarker peptides, which are acetylated or unacetylated, for multiple myeloma. The invention also relates to a kit comprising a detection agent and instructions for identifying a biomarker peptide of the invention. The invention further relates to a method for monitoring treatment efficiency of an HDAC inhibitor in a subject.

### CROSS REFERENCE TO RELATED APPLICATIONS

[0001] This application claims priority to U.S. Provisional Application Ser. No. 61/830,371, filed Jun. 3, 2013, which is hereby incorporated by reference in its entirety.

### FIELD OF THE INVENTION

[0002] Provided herein are histone deacetylase (HDAC) biomarkers in multiple myeloma. Specifically, the biomarkers are drug specific, histone deacetylase (HDAC) or HDAC6 biomarker peptides, which are acetylated, for multiple myeloma. Alternatively, the biomarkers are drug specific, HDAC6 biomarker peptides, which are acetylated or unacetylated, for multiple myeloma. The invention also relates to a kit comprising a detection agent and instructions for identifying a biomarker peptide of the invention. The invention further relates to a method for monitoring treatment efficiency of an HDAC inhibitor in a subject.

### BACKGROUND OF THE INVENTION

[0003] Cancer is one of the leading causes of death in the United States and in the world. It is estimated that approximately 1.6 million new cases of cancer will occur in the United States in 2012. It is also estimated that approximately 575,000 people will die from cancer in the United States in 2012.

[0004] Cancer grows out of normal cells in the body. Normal cells multiply when the body needs them, and die when the body doesn't need them. Cancer occurs when the cells in the body grow and multiply out of control.

[0005] There are many causes of cancer, such as exposure to carcinogenic chemicals, use of tobacco, drinking excess alcohol, exposure to environmental toxins, exposure to excessive sunlight, genetic problems, obesity, radiation, and viruses. In addition, the cause of many cancers remains unknown.

[0006] There are many different types of cancer, which can develop in almost any organ or tissue in the body. One type of cancer is multiple myeloma.

[0007] Multiple myeloma, also known as plasma cell myeloma or Kahler's disease, is a cancer of plasma cells. In multiple myeloma, collections of abnormal plasma cells accumulate in the bone marrow, where they interfere with the production of normal blood cells.

[0008] Because many organs can be affected by myeloma, the symptoms and signs vary greatly. Effects of myeloma include elevated calcium, renal failure, anemia, and bone lesions.

[0009] Myeloma is generally thought to be treatable, but incurable. Remission may be induced with steroids, chemotherapy, proteasome inhibitors, immunomodulatory drugs such as thalidomide or lenalidomide, and stem cell transplants.

[0010] Myeloma develops in 1-4 per 100,000 people per year. With conventional treatment, median survival is 3-4 years, which may be extended to 5-7 years or longer with advanced treatments. Multiple myeloma is the second most common hematological malignancy in the U.S. (after non-Hodgkin lymphoma), and constitutes 1% of all cancers.

[0011] Accordingly, there is a need to quickly and reliably identify biomarkers that are indicative of treatment efficiency in multiple myeloma.

### SUMMARY OF THE INVENTION

[0012] To meet this and other needs, provided herein are histone deacetylase (HDAC) biomarkers in multiple myeloma and methods of using such biomarkers. Specifically, the biomarkers are drug specific, histone deacetylase (HDAC) or HDAC6 biomarker peptides, which are acetylated, for multiple myeloma. Alternatively, the biomarkers are drug specific, HDAC6 biomarker peptides, which are acetylated or unacetylated, for multiple myeloma.

[0013] An embodiment of the invention comprises a Compound B specific histone deacetylase 6 (HDAC6) biomarker peptide, which is acetylated, for multiple myeloma comprising (or consisting of) an amino acid sequence selected from the group consisting of SEQ ID NOs: 1-18, and 323-490.

[0014] Another embodiment of the invention comprises a Tubastatin A specific histone deacetylase 6 (HDAC6) biomarker peptide, which is acetylated, for multiple myeloma comprising (or consisting of) an amino acid sequence selected from the group consisting of SEQ ID NOs: 1-322.

[0015] An additional embodiment of the invention comprises a joint Compound B and Tubastatin A specific histone deacetylase 6 (HDAC6) biomarker peptide, which is acetylated, for multiple myeloma comprising (or consisting of) an amino acid sequence selected from the group consisting of SEQ ID NOs: 1-18.

[0016] Another embodiment of the invention comprises a Compound A specific histone deacetylase (HDAC) biomarker peptide, which is acetylated, for multiple myeloma comprising (or consisting of) an amino acid sequence selected from the group consisting of SEQ ID NOs: 12-18, 245-322, and 476-817.

[0017] An additional embodiment of the invention comprises a Compound B specific histone deacetylase 6 (HDAC6) biomarker peptide, which is acetylated or unacetylated, for multiple myeloma comprising (or consisting of) an amino acid sequence selected from the group consisting of SEQ ID NOs: 818-15721.

[0018] A further embodiment of the invention comprises a kit comprising an anti-acetylated lysine antibody and instructions for identifying an acetylated biomarker peptide comprising (or consisting of) an amino acid sequence selected from the group consisting of SEQ ID Nos: 1-817.

[0019] Alternatively, an embodiment of the invention comprises a kit comprising a detection agent and instructions for identifying an acetylated or unacetylated biomarker peptide comprising (or consisting of) an amino acid sequence selected from the group consisting of SEQ ID NOs: 818-15721.

[0020] A further embodiment of the invention comprises a method for monitoring the treatment efficiency of a histone deacetylase (HDAC) inhibitor in a subject comprising: a) administering a therapeutically effective amount of an HDAC inhibitor to a subject; b) taking a biological sample from the subject; c) determining whether an HDAC biomarker peptide comprising (or consisting of) an amino acid sequence selected from the group consisting of SEQ ID NOs: 1-15721 is present in the sample; and d) concluding that the HDAC treatment is efficient if an HDAC biomarker peptide comprising (or consisting of) an amino acid sequence selected from the group consisting of SEQ ID NOs: 1-15721 is present in the sample, and concluding that the HDAC treatment is not efficient if an HDAC biomarker peptide comprising (or consisting of) an amino acid sequence selected from the group consisting of SEQ ID NOs: 1-15721 is not present in the sample. Preferably, the HDAC inhibitor is selected from the group consisting of: Compound A, Compound B, and Tubastatin A. Preferably, the HDAC inhibitor is an HDAC6 inhibitor. Preferably, the HDAC6 inhibitor is selected from the group consisting of Compound B, and Tubastatin A. Preferably, the biological sample is a bone marrow sample. In one embodiment, the biological sample is a subcellular fraction (e.g., cytoplasm, soluble nuclear extract, or insoluble nuclear pellet). Preferably, the determining step utilizes an antibody.

[0021] A further embodiment of the invention comprises a method for monitoring the treatment efficiency of a histone deacetylase (HDAC) inhibitor in a subject comprising: a) administering a therapeutically effective amount of an HDAC inhibitor to a subject; b) taking a biological sample from the subject; c) determining whether an HDAC biomarker peptide comprising (or consisting of) an amino acid sequence selected from the group consisting of SEQ ID NOs: 1-15721 is present in the sample; and d) concluding that the HDAC treatment is efficient if the level of an HDAC biomarker peptide comprising (or consisting of) an amino acid sequence selected from the group consisting of SEQ ID NOs: 1-15721 in the biological sample is modulated relative to a control sample, and concluding that the HDAC treatment is not efficient if the level of an HDAC biomarker peptide comprising (or consisting of) an amino acid sequence selected from the group consisting of SEQ ID NOs: 1-15721 in the biological sample is not modulated relative to the control sample. Preferably, the HDAC inhibitor is selected from the group consisting of: Compound A, Compound B, and Tubastatin A. Preferably, the HDAC inhibitor is an HDAC6 inhibitor. Preferably, the HDAC6 inhibitor is selected from the group consisting of Compound B, and Tubastatin A. Preferably, the biological sample is a bone marrow sample. In one embodiment, the biological sample is a subcellular fraction (e.g., cytoplasm, soluble nuclear extract, or insoluble nuclear pellet). Preferably, the determining step utilizes an antibody. Preferably, the control sample is from a healthy subject. In one embodiment, the level of HDAC biomarker peptide in the sample is increased relative to the control sample. In another embodiment, the level of HDAC biomarker peptide in the biological sample is decreased relative to the control sample.

### DETAILED DESCRIPTION OF THE INVENTION

### Definitions

[0022] Unless defined otherwise, all technical and scientific terms used herein have the same meaning as is commonly understood by one of ordinary skill in the art.

[0023] The articles “a” and “an” are used herein to refer to one or more than one (i.e., to at least one) of the grammatical object of the article. By way of example, “a biomarker” means one biomarker or more than one biomarker.

[0024] The terms “administer” or “administration” refer to the act of injecting or otherwise physically delivering a substance as it exists outside the body (e.g., a formulation of the invention) into a patient, such as by mucosal, intradermal, intravenous, intramuscular delivery and/or any other method of physical delivery described herein or known in the art. When a disease, or a symptom thereof, is being treated, administration of the substance typically occurs after the onset of the disease or symptoms thereof. When a disease, or symptoms thereof, is being prevented, administration of the substance typically occurs before the onset of the disease or symptoms thereof.

[0025] Unless specifically indicated otherwise, the term “antibody,” as used herein, shall be understood to encompass antibody molecules comprising two immunoglobulin heavy chains and two immunoglobulin light chains (i.e., “full antibody molecules”) as well as antigen-binding fragments thereof. The terms “antigen-binding portion” of an antibody, “antigen-binding fragment” of an antibody, and the like, as used herein, include any naturally occurring, enzymatically obtainable, synthetic, or genetically engineered polypeptide or glycoprotein that specifically binds an antigen to form a complex. Antigen-binding fragments of an antibody may be derived, e.g., from full antibody molecules using any suitable standard techniques such as proteolytic digestion or recombinant genetic engineering techniques involving the manipulation and expression of DNA encoding antibody variable and (optionally) constant domains. Such DNA is known and/or is readily available from, e.g., commercial sources, DNA libraries (including, e.g., phage-antibody libraries), or can be synthesized. The DNA may be sequenced and manipulated chemically or by using molecular biology techniques, for example, to arrange one or more variable and/or constant domains into a suitable configuration, or to introduce codons, create cysteine residues, modify, add or delete amino acids, etc.

[0026] An antibody that “binds” an antigen of interest is one capable of binding that antigen with sufficient affinity such that the antibody is useful in detecting the presence of the antigen.

[0027] The term “biological sample” shall generally mean any biological sample obtained from an individual, body fluid, cell line, tissue culture, or other source. Body fluids are, for example, blood, lymph, sera, plasma, urine, semen, synovial fluid, and spinal fluid. Methods for obtaining tissue biopsies and body fluids from mammals are well known in the art. If the term “sample” is used alone, it shall still mean that the “sample” is a “biological sample”, i.e., the terms are used interchangeably.

[0028] The terms “composition” and “formulation” are intended to encompass a product containing the specified ingredients (e.g., an HDAC inhibitor) in, optionally, the specified amounts, as well as any product which results, directly or indirectly, from the combination of the specified ingredients in, optionally, the specified amounts.

[0029] The term “excipients” refers to inert substances that are commonly used as a diluent, vehicle, preservative, binder, stabilizing agent, etc. for drugs and includes, but is not limited to, proteins (e.g., serum albumin, etc.), amino acids (e.g., aspartic acid, glutamic acid, lysine, arginine, glycine, histidine, etc.), fatty acids and phospholipids (e.g., alkyl sulfonates, caprylate, etc.), surfactants (e.g., SDS, polysorbate, nonionic surfactant, etc.), saccharides (e.g., sucrose, maltose, trehalose, etc.) and polyols (e.g., mannitol, sorbitol, etc.). See, also, Remington's Pharmaceutical Sciences (1990) Mack Publishing Co., Easton, Pa., which is hereby incorporated by reference in its entirety.

[0030] The phrases “respond to treatment with a HDAC inhibitor” or “respond to treatment with a HDAC6 inhibitor” or similar phrases refer to the clinical benefit imparted to a patient suffering from a disease or condition, such as cancer, from or as a result of the treatment with the HDAC inhibitor (e.g., a HDAC6 inhibitor). A clinical benefit includes a complete remission, a partial remission, a stable disease (without progression), progression-free survival, disease free survival, improvement in the time-to-progression (of the disease), improvement in the time-to-death, or improvement in the overall survival time of the patient from or as a result of the treatment with the HDAC inhibitor. There are criteria for determining a response to therapy and those criteria allow comparisons of the efficacy to alternative treatments (Slapak and Kufe, Principles of Cancer Therapy, in Harrisons's Principles of Internal Medicine, 13th edition, eds. Isselbacher et al., McGraw-Hill, Inc., 1994). For example, a complete response or complete remission of cancer is the disappearance of all detectable malignant disease. A partial response or partial remission of cancer may be, for example, an approximately 50 percent decrease in the product of the greatest perpendicular diameters of one or more lesions or where there is not an increase in the size of any lesion or the appearance of new lesions.

[0031] The term “progression of cancer” includes and may refer to metastasis, a recurrence of cancer, or an at least approximately 25 percent increase in the product of the greatest perpendicular diameter of one lesion or the appearance of new lesions. The progression of cancer is “inhibited” if recurrence or metastasis of the cancer is reduced, slowed, delayed, or prevented.

[0032] The terms “marker protein”, “marker polypeptide”, “biomarker protein”, or “biomarker polypeptide” include a protein or polypeptide that is a useful indicator of treatment efficiency in multiple myeloma.

[0033] A “kit” is any manufacture (e.g., a package or container) comprising at least one reagent, e.g., an antibody, for specifically detecting a biomarker protein or polypeptide.

[0034] As used herein, the term “small molecule” refers to a non-peptidic, non-oligomeric organic compound either synthesized in the laboratory or found in nature. Small molecules, as used herein, can refer to compounds that are “natural product-like”, however, the term “small molecule” is not limited to “natural product-like” compounds. Rather, a small molecule is typically characterized in that it contains several carbon-carbon bonds, and has a molecular weight of less than 1500, although this characterization is not intended to be limiting for the purposes of the present invention. Examples of “small molecules” that occur in nature include, but are not limited to, taxol, dynemicin, and rapamycin. In certain other preferred embodiments, natural-product-like small molecules are utilized.

[0035] The terms “isolated,” “purified,” or “biologically pure” refer to material that is substantially or essentially free from components that normally accompany it as found in its native state. Purity and homogeneity are typically determined using analytical chemistry techniques such as polyacrylamide gel electrophoresis or high performance liquid chromatography. Particularly, in embodiments the compound is at least 85% pure, more preferably at least 90% pure, more preferably at least 95% pure, and most preferably at least 99% pure.

[0036] The term “therapy” refers to any protocol, method, and/or agent that can be used in the prevention, management, treatment, and/or amelioration of a disease.

[0037] The term “therapeutically effective amount” means an amount of a drug that causes a measurable effect in a subject, such as an amount effective for killing or inhibiting the growth of tumor cells.

[0038] “Treat”, “treating”, and “treatment” refer to a method of alleviating or abating a disease and/or its attendant symptoms.

[0039] The term “treatment efficiency” means how well a drug is doing its job, i.e, acting upon a target to produce a therapeutic effect.

### Stable Isotope Labeling by Amino Acids in Cell Culture (SILAC)

[0040] An embodiment of the invention comprises utilizing the SILAC method in order to quantitate changes in protein expression between two or more populations of cells. The SILAC method is a technique based on mass spectrometry that detects differences in protein abundance among samples using non-radioactive isotopic labeling. The SILAC method is known in the art, and described in detail in Ong et al., “Stable Isotope Labeling by Amino Acids in Cell Culture, SILAC, as a Simple and Accurate Approach to Expression Proteomics”, Molecular & Cellular Proteomics, vol. 1, pp. 376-386 (2002), which is incorporated herein by reference in its entirety.

[0041] Briefly, the SILAC method involves growing two populations of cells in cell culture. The first population of cells is grown in growth media containing normal amino acids (“normal media”). The second population of cells is grown in media lacking a standard essential amino acid (such as lysine), but is then supplemented with a non-radioactive, isotopically labeled form of that essential amino acid (such as lysine labeled with ¹³C atoms, rather than normal ¹²C atoms), which is called “heavy media”. When the two populations of cells are each growing in the medium, they incorporate the amino acids into all of their proteins. The growth of cells maintained in the heavy media is no different from that in normal media. All peptides containing the heavy amino acids are heavier than their normal counterparts. The cells from each of the two populations of cells are lysed. The lysates from each of the two cell populations are then combined. The combined cell lysates are then analyzed by mass spectrometry. Pairs of chemically identical peptides of different stable isotope composition can be differentiated in a mass spectrometer due to their difference in mass. The ratio of peak intensities in the mass spectrum for such peptide pairs reflects the abundance ratio for the two proteins.

[0042] The SILAC method involves a control population of cells and a test population of cells. The test population of cells may be subject to treatment with a drug or some other outside stimulus.

[0043] Preferably, the test population of cells is treated with an HDAC inhibitor. Examples of HDAC inhibitors include, but are not limited to, hydroxamic acids, cyclic tetrapeptides, benzamides, electrophilic ketones, and aliphatic acid compounds.

[0044] More preferably, the test population of cells is treated with an HDAC6 inhibitor. Examples of HDAC6 inhibitors include, but are not limited to, Compound B and Tubastatin A.

[0045] Alternatively, the test population of cells is treated with an HDAC inhibitor that inhibits HDACs 1, 2, 3, and 6. An example of such an HDAC inhibitor is Compound A.

[0046] The cells may be any type of cells, which will depend upon what is to be studied. However, both populations of cells should contain the same type of cell. Preferably, a cancer cell line is used in the SILAC method. For example, the cell line can be specific for breast cancer, hematologic cancer, colorectal cancer, lung cancer, skin cancer, brain cancer, renal cancer, liver cancer, prostate cancer, ovarian cancer, and stomach cancer. However, cell lines specific for other forms of cancer may be used.

[0047] The cells are grown in growth media. If the set of cells contains a control group of cells and a test group of cells, then one group of cells will be grown in growth media containing normal amino acids, and the other group of cells will be grown in media lacking a standard essential amino acid that is then supplemented with a non-radioactive, isotopically labeled form of that essential amino acid (such as an amino acid labeled with ¹³C atoms, rather than normal ¹²C atoms).

[0048] The heavy media lacks an essential amino acid, but is then supplemented with a non-radioactive, isotopically labeled form of that essential amino acid. Of the 20 standard amino acids, nine are essential amino acids. The nine essential amino acids are: histidine, isoleucine, leucine, lysine, methionine, phenylalanine, threonine, tryptophan, and valine. The heavy media may lack any one or more of the above essential amino acids. Preferably, the heavy media lacks normal lysine. However, the heavy media must then be supplemented with a non-radioactive, isotopically labeled form of that essential amino acid. Preferably, the non-radioactive, isotopically labeled essential amino acid is ¹³C labeled lysine.

[0049] The isotope label may include specific heavy isotopes of elements present in biomolecules such as ²H, ³H, ¹³C, ¹⁴C, ¹⁵N, ¹⁸O, ³²P, ³³P, ³³S, ³⁴S, ¹²⁵I, or ¹³¹I. Thus the essential amino acid may be labeled with any one of the above isotopes, or another isotope.

[0050] The cells may be lysed by any means known in the art.

[0051] The performance of mass spectrometry is known in the art.

### Cytoplasm (C), Soluble Nuclear Extract (N), and Insoluble Nuclear Pellet (P) Analysis (CNP Analysis)

[0052] An embodiment of the invention comprises fractionating a population of cells, such as a test group of cells, into three subcellular fractions—cytoplasm (C), soluble nuclear extract (N), and insoluble nuclear pellet (P).

[0053] The SILAC method is performed as described above.

[0054] The harvested “heavy” and “light” labeled cells are lysed. The supernatants from each are then saved after centrifugation. The protein concentration in both the “heavy” or “light” labeled supernatant is measured. Equal amounts of crude proteins in the supernatants are mixed, and the crude proteins are precipitated (this is called the cytosolic fraction). After washing, the protein pellets are dissolved for trypsin digestion.

[0055] The remaining cell pellets are further lysed. The resulting lysates are clarified by centrifugation, and the supernatant is saved as nuclear extracts fractions. The protein concentration in “heavy” or “light” labeled supernatant is measured. Equal amounts of crude proteins in supernatant are mixed, and the crude proteins are precipitated (this is called the nuclear extracts fraction). After washing, the proteins pellets are dissolved for trypsin digestion.

[0056] The final remaining cell pellets are dissolved in urea to extract the chromatin-binding proteins. The protein concentration is then measured. Then, equal amounts of chromatin-binding proteins in urea solution are mixed, and the proteins are precipitated (this is called the nuclear pellet fraction). After washing, the proteins pellets are dissolved for trypsin digestion.

[0057] After trypsin digestion for the above three fractions, the Kac affinity enrichment followed by MS analysis and data inquiry are separately performed. The combined Kac data formed the total Kac profiling data in the pair of Compound B vs DMSO.

[0058] Any peptides identified as drug specific, such as HDAC specific, in the SILAC method described above with this subcellular localization will allow one to understand the peptide's function inside the cell.

### Biological Pathway Analysis

[0059] Once biomarker peptides are identified for a specific drug by the SILAC method, the biomarker peptides may be compared to peptides/proteins in a biological pathway database in order to identify major biological pathways or functions implicated by the drug's action. A preferred pathway analysis website is at www dot broadinstitute dot org/gsea/index dot jsp. Such analysis will be related to the drug's (e.g., HDAC or HDAC6) specific clinical effects.

### Analysis of Total Peptide (Including Both Acetylated and Unacetylated) Amount in Compound B Treated Cell Lysate

[0060] The SILAC method is performed as described above. The Compound B- (¹²C-lysine labeled) and DMSO-treated (¹³C-lysine labeled) cells are lysed. The samples are sonicated, and centrifuged to remove remaining debris. Protein content in the supernatant is determined Crude protein from each sample is mixed and separated. After electrophoresis, the gel is stained. The entire gel lane is cut into slices and digested with trypsin. The gel bands are cut into small cubes and washed. The gel pieces are dehydrated. Supernatant is discarded and the gel pieces are vacuum-dried. Disulfide bonds are cleaved and then alkylated. The gel pieces are dehydrated and vacuum-dried again. Gel pieces are covered with trypsin solution (10 ng/μl in 50 mM ammonium bicarbonate buffer). After incubation, the remaining trypsin solution is removed. The peptides in the gels are extracted. All the supernatant is combined and vacuum-dried followed by mass spectrometer analysis.

### Histone Deacetylase (HDAC) Inhibitors

[0061] An HDAC inhibitor useful in the SILAC method and in the Examples herein can be any HDAC inhibitor, such as a small molecule organic compound, an antibody, a siRNA, an aptamer, a nucleic acid, a protein, or a peptide. Preferably, the HDAC inhibitor is a small molecule organic compound.

[0062] Preferably, the HDAC inhibitor is an HDAC6 inhibitor. This means that the HDAC inhibitor selectively inhibits HDAC6 over other forms of HDAC.

[0063] In a specific embodiment, an HDAC inhibitor has the following chemical structure:

[chemical structure]

which is referred to herein as Compound A. Methods for making Compound A are known in the art.

[0064] In another specific embodiment, an HDAC 6 inhibitor has the following chemical structure:

[chemical structure]

which is referred to herein as Compound B. Methods for making Compound B are known in the art.

[0065] In yet another specific embodiment, an HDAC 6 inhibitor has the following chemical structure:

[chemical structure]

which is referred to herein as Tubastatin A. Methods for making Tubastatin A are known in the art.

[0066] HDAC inhibitors have one or more of the following properties: the compound is capable of inhibiting at least one histone deacetylase; the compound is capable of inhibiting HDAC6; the compound is a selective HDAC6 inhibitor; the compound binds to the poly-ubiquitin binding domain of HDAC6; the compound is capable of inducing apoptosis in cancer cells (especially multiple myeloma cells, non-Hodgkin's lymphoma (NML) cells, breast cancer cells, acute myelogeous leukemia (AML) cells); and/or the compound is capable of inhibiting aggresome formation.

[0067] An HDAC inhibitor may comprise a metal binding moiety, preferably a zinc-binding moiety such as a hydroxamate. Certain hydroxamates are potent inhibitors of HDAC6 activity; without wishing to be bound by theory, it is believed that the potency of these hydroxamates is due, at least in part, to the ability of the compounds to bind zinc. An HDAC inhibitor may include at least one portion or region that can confer selectivity for a biological target implicated in the aggresome pathway, e.g., a biological target having tubulin deacetylase (TDAC) or HDAC activity, e.g., HDAC6. Thus, some HDAC inhibitors include a zinc-binding moiety spaced from other portions of the molecule that are responsible for binding to the biological target.

### Biomarkers

[0068] As shown in the Examples herein, the SILAC method may be used to identify biomarkers that tell us why a particular set of cells is killed. That is, the biomarkers are indicative of HDAC inhibitors and cell death in myeloma.

[0069] The set of cells may contain a control group of cells and a test group of cells. This set of cells allows one to determine how a particular drug works in a particular type of cancer cell.

[0070] Preferably, the biomarkers are selected from the peptides in Table 1 (which are identical to the peptides in Table 2) and Table 9.

### Kits

[0071] Certain embodiments of the invention include kits that may be used in the experimental methods in order to identify drug specific and disease specific biomarkers.

[0072] For example, in a certain embodiment of the invention, the invention provides a kit comprising one or more of the following: a drug; a cell line; cell growth media containing normal amino acids; cell growth media lacking a standard essential amino acid; a non-radioactive, isotopically labeled form of that essential amino acid; a cell lysis buffer; a protease such as trypsin; a non-specific anti-acetylated amino acid antibody cocktail; a detection agent; and instructions for performing the SILAC method and identifying a biomarker peptide of the invention.

### Methods

[0073] An embodiment of the invention provides a method for monitoring the treatment efficiency of a drug in a subject. Preferably, the drug is an HDAC inhibitor.

[0074] In a specific embodiment, the invention provides a method for monitoring the treatment efficiency of a histone deacetylase (HDAC) inhibitor in a subject comprising:

a) administering a therapeutically effective amount of an HDAC inhibitor to a subject;
b) taking a biological sample from the subject;
c) determining whether an HDAC biomarker peptide comprising an amino acid sequence selected from the group consisting of SEQ ID NOs: 1-15721 is present in the sample; and
d) concluding that the HDAC treatment is efficient if an HDAC biomarker peptide comprising an amino acid sequence selected from the group consisting of SEQ ID NOs: 1-15721 is present in the sample, and concluding that the HDAC treatment is not efficient if an HDAC biomarker peptide comprising an amino acid sequence selected from the group consisting of SEQ ID NOs: 1-15721 is not present in the sample.

[0075] The method will monitor whether the HDAC treatment that a patient receives is efficient. That is, the method will be indicative of HDAC inhibition and cell death.

[0076] As discussed above, the HDAC inhibitor may be any HDAC inhibitor known in the art. Preferably, the HDAC inhibitor is selected from the group consisting of: Compound A, Compound B, and Tubastatin A. Preferably, the HDAC inhibitor is an HDAC6 inhibitor. More preferably, the HDAC6 inhibitor is selected from the group consisting of Compound B, and Tubastatin A.

[0077] The HDAC inhibitor may be administered using any therapeutically effective amount and any route of administration.

[0078] The method involves taking a biological sample from a patient in order to determine the treatment efficiency of a drug in a patient with a particular disease. For example, the biological sample may be a sample from whole blood, blood serum, blood plasma, semen, urine, mucus, bone marrow, or other body sample. In a preferred embodiment, the biological sample is from bone marrow.

[0079] The determining step may use any means or detection agent known in the art to identify an acetylated or unacetylated peptide of the invention. Preferably, the determining step utilizes an antibody. More preferably, the determining step utilizes a non-specific anti-acetylated lysine antibody cocktail to identify acetylated biomarker peptides of the invention. Alternatively, peptide specific antibodies may be used to identify the unacetylated biomarker peptides of the invention.

[0080] All patents, patent applications, and publications mentioned herein are each hereby incorporated by reference in their entirety.

### EXAMPLES

[0081] The following examples are provided to aid in the understanding of the invention. It is understood that modifications can be made to the procedures set forth below without departing from the spirit and scope of the invention.

[0082] Conventional techniques of molecular biology and nucleic acid/protein chemistry, which are within the skill of the art, are explained in the literature and used in the practice of the invention. See, for example, Sambrook, J. et al., Molecular Cloning: A Laboratory Manual, Cold Spring Harbor Laboratory Press, Cold Spring Harbor, N.Y., 1989; Gait, M. J. (ed.), Oligonucleotide synthesis—a practical approach, IRL Press Limited, 1984; Hames, B. D. and Higgins, S. J. (eds.), Nucleic acid hybridisation—a practical approach, IRL Press Limited, 1985; and a series, Methods in Enzymology, Academic Press, Inc., all of which are incorporated herein by reference.

### Example 1

### SILAC Method

[0083] This example describes SILAC studies that were performed to compare the effects of three different HDAC inhibitors (Compound A, Compound B, and tubastatin A) to a control on a human multiple myeloma cell line. The HDAC inhibitors were also compared amongst themselves to determine differences in their effects.

[0084] A human myeloma cell line MM.1S was grown using either ¹²C (light) or ¹³C (heavy) lysine containing culture medium. The “heavy” cells were treated with DMSO as the control, and the “light” cells were treated with a single HDAC inhibitor at 37° C. for 6 hours. The heavy and light cells were lysed, and the lysates were mixed in 1:1 ratio and digested with the protease trypsin. The acetylated lysine containing peptides (due to the action of the HDAC inhibitor) in the digested peptide pool were captured by a non-specific anti-acetylated lysine antibody cocktail (the antibodies identify both light and heavy acetylated peptides), and subjected to mass spectrometry analysis in order to identify thousands of individual peptides.

[0085] Thousands of peptides were identified in pairs (¹²C and ¹³C) due to their known mass differences. The amino acid sequence and quantitative ratio (Light/Heavy) of a given peptide in two differentially treated cell lysates were then determined and annotated with their possible protein (gene) sources.

[0086] As stated above, three HDAC inhibitors (Compound A, Compound B, and Tubastatin A) were used. Thus, the SILAC method was performed three times, with a different HDAC inhibitor compared to a control each time. Accordingly, there are three pairs of quantitative data in the table below, i.e., Compound A:DMSO, Compound B:DMSO, and Tubastatin A:DMSO. A cut-off of 1.30 fold of change (increase or decrease) was then used to determine “changed” or “+” in the table, and any peptides with a fold of change less than 1.3 fold were determined to be “unchanged” or “0” in the table. Those peptides that were not identified were marked as “NA” in the table.

[0087] Since Compound A is able to inhibit HDAC1, 2, 3 and 6, and Compound B and Tubastatin A can only inhibit HDAC6 at the concentration used in this study, any AcKs (acetylated lysine) in Compound B or Tubastatin A can be referred to as HDAC6 specific. Although both Compound B and Tubastatin A are selective HDAC6 inhibitors, some previous cell biology studies have shown them to have differential activities. As a result, both compounds were used in order to investigate their similarities and differences.

[0088] The results of these studies are shown in Table 1 below.

[0089] The first column of Table 1 shows the amino acid sequence of the acetylated peptide that was identified by the SILAC method, wherein “(ac)” means that the previous amino acid was acetylated.

[0090] The second, third, and fourth columns of Table 1 show data for Compound A, Tubastatin A, and Compound B, respectively. The numbers in these columns represent the light to heavy ratio (L/H ratio) for each peptide for each drug treated group of cells. The numbers are in a log 2 scale so 1 represents a 2× change, 0 represents no change, and NA represents unknown.

[0091] The fifth column of Table 1 shows the gene name and position information, which is in parentheses, for the acetylated lysine. One number in parentheses means that only one lysine was acetylated. Two numbers in parentheses means that two lysines were acetylated.

[0092] The sixth column of Table 1 shows the gene symbol for the peptide in the fifth column.

| | Cmpd | Tub | Cmpd | | |
|---|---|---|---|---|---|
| Peptide | A | A | B | Protein_Position | Gene |
| FK(ac)ESFAEMNR (SEQ ID NO: 1) | 0.00 | 0.52 | −0.67 | Cytochrome c oxidase subunit 4 | COX4I1 |
| | | | | isoform 1 mitochondrial [87] | |
| ELNK(ac)ILEGR (SEQ ID NO: 2) | 0.00 | 0.45 | 0.47 | Dihydrolipoyllysine-residue | DLAT |
| | | | | acetyltransferase component of | |
| | | | | pyruvate dehydrogenase complex | |
| | | | | mitochondrial [466] | |
| AAEVLNK(ac)HSLSGRPLK | 0.00 | −0.87 | −0.74 | Isoform 1 of Heterogeneous nu- | HNRNPM |
| (SEQ ID NO: 3) | | | | clear ribonucleoprotein M [134] | |
| LYK(ac)EELEQTYHAK | 0.00 | 0.46 | 0.48 | Lamin-B1 [261] | LMNB1 |
| (SEQ ID NO: 4) | | | | | |
| TLVLSDK(ac)HSPQK(ac)K | 0.00 | 0.67 | 0.38 | Isoform 1 of Histone-lysine N- | MLL3 |
| (SEQ ID NO: 5) | | | | methyltransferase MLL3 | |
| | | | | [2809:2814] | |
| (ac)CNTPTYCDLGK(ac)AAK | 0.00 | 0.52 | −0.63 | Isoform 1 of Voltage-dependent | VDAC3 |
| (SEQ ID NO: 6) | | | | anion-selective channel protein | |
| | | | | 3 [12] | |
| LGTDESK(ac)FNAVLCSR | NA | −0.44 | 0.50 | cDNA FLJ55482 highly similar | ANXA11 |
| (SEQ ID NO: 7) | | | | to Annexin A11 [478] | |
| SFDSEFK(ac)LACK | NA | 0.44 | 0.51 | Cytoplasmic dynein 1 heavy | DYNC1H1 |
| (SEQ ID NO: 8) | | | | chain 1 [4283] | |
| EPVAVLK(ac)ANR | NA | −0.58 | −0.40 | Beta-hexosaminidase subunit | HEXB |
| (SEQ ID NO: 9) | | | | beta [161] | |
| LNK(ac)DQWEER | NA | −0.38 | 0.71 | Moesin [165] | MSN |
| (SEQ ID NO: 10) | | | | | |
| DFLAGGVAAAISK(ac)TAVAPIER | NA | 0.80 | −0.47 | ADP/ATP translocase 2 [23] | SLC25A5 |
| (SEQ ID NO: 11) | | | | | |
| YYNK(ac)YINVK | 0.54 | 0.66 | −0.43 | Isoform 1 of ATP synthase | ATP5J2 |
| (SEQ ID NO: 12) | | | | subunit f mitochondrial [54] | |
| TNK(ac)NK(ac)SSISR | 1.00 | 0.64 | 0.62 | CREB-binding protein | CREBBP |
| (SEQ ID NO: 13) | | | | [1595:1597] | |
| TSK(ac)NK(ac)SSLSR | 1.00 | 0.42 | 0.43 | Histone acetyltransferase | EP300 |
| (SEQ ID NO: 14) | | | | p300 [1558:1560] | |
| AGGK(ac)AGK(ac)DSGK | 1.00 | 0.47 | 0.95 | Histone H2A.V [5:8] | H2AFV |
| (SEQ ID NO: 15) | | | | | |
| PDPAK(ac)SAPAPK(ac)K | 1.00 | 0.47 | 0.66 | Histone H2B type 1-O [6:12] | HIST1H2BO |
| (SEQ ID NO: 16) | | | | | |
| YLTNQK(ac)NSNSK(ac)NDR | 1.00 | 0.58 | 0.43 | Isoform 3 of Chromatin | MEAF6 |
| (SEQ ID NO: 17) | | | | modification-related | |
| | | | | protein MEAF6 [69:74] | |
| GVTQFGNK(ac)YIQQTKPLTLER | 1.00 | 0.50 | 0.50 | Cleavage and polyadenylation | NUDT21 |
| (SEQ ID NO: 18) | | | | specificity factor subunit | |
| | | | | 5 [23] | |
| IHNFGLIQEK(ac)LAR | 0.00 | −0.60 | NA | cDNA FLJ56425 highly similar to | ACADVL |
| (SEQ ID NO: 19) | | | | Very-long-chain specific acyl- | |
| | | | | CoAdehydrogenase mitochondrial | |
| | | | | [428] | |
| LDHLAEK(ac)FR (SEQ ID NO: 20) | 0.00 | −0.51 | 0.00 | Isoform 1 of Alpha-actinin-1 | ACTN1 |
| | | | | [398] | |
| LK(ac)DISTLEPLKK | 0.00 | −0.56 | 0.00 | Isoform 1 of Acidic leucine-rich | ANP32B |
| (SEQ ID NO: 21) | | | | nuclear phosphoprotein 32 family | |
| | | | | member B [101] | |
| QRQEVCQSYK(ac)SLYGK | 0.00 | 0.68 | 0.00 | Annexin A6 [63] | ANXA6 |
| (SEQ ID NO: 22) | | | | | |
| MYFDK(ac)YVLKPATEGK | 0.00 | 0.62 | 0.00 | Isoform 2 of ATPase family AAA | ATAD3A |
| (SEQ ID NO: 23) | | | | domain-containing protein | |
| | | | | 3A [491] | |
| IVEYEK(ac)EMEK | 0.00 | 0.63 | 0.00 | Isoform 1 of ATP synthase | ATP5H |
| (SEQ ID NO: 24) | | | | subunit d mitochondrial [117] | |
| FYGDEEK(ac)DKGLQTSQDAR | 0.00 | −0.97 | 0.00 | Calreticulin [62] | CALR |
| (SEQ ID NO: 25) | | | | | |
| ALEHFTDLYDIK(ac)R | 0.00 | −0.62 | 0.00 | Isoform 1 of Clathrin heavy | CLTC |
| (SEQ ID NO: 26) | | | | chain 1 [637] | |
| KYEFSPQTLCCYGK(ac)QLCTIPR | 0.00 | 0.60 | 0.00 | CREB-binding protein [1216] | CREBBP |
| (SEQ ID NO: 27) | | | | | |
| ALK(ac)DLYCHK | 0.00 | 0.43 | 0.00 | cAMP-responsive element modu- | CREM |
| (SEQ ID NO: 28) | | | | lator isoform s [240] | |
| LYCPK(ac)CMDVYTPK | 0.00 | −0.39 | 0.00 | Casein kinase II subunit | CSNK2B |
| (SEQ ID NO: 29) | | | | beta [139] | |
| FK(ac)DPNCVGTVLASR | 0.00 | −0.51 | 0.00 | Isoform 1 of DAZ-associated | DAZAP1 |
| (SEQ ID NO: 30) | | | | protein 1 [59] | |
| APTIVGK(ac)SSLNPILFR | 0.00 | −0.51 | 0.00 | Dolichyl-diphosphooligo- | DDOST |
| (SEQ ID NO: 31) | | | | saccharide--protein glycosyl | |
| | | | | transferase 48 kDa subunit [189] | |
| FEK(ac)NFYVEHPEVAR | 0.00 | −0.42 | 0.00 | probable ATP-dependent RNA | DDX17 |
| (SEQ ID NO: 32) | | | | helicase DDX17 isoform 3 [132] | |
| DWVLNEFK(ac)HGK | 0.00 | −0.41 | 0.00 | Probable ATP-dependent RNA | DDX5 |
| (SEQ ID NO: 33) | | | | helicase DDX5 [388] | |
| FGNPGEK(ac)LVK (SEQ ID NO: 34) | 0.00 | 0.45 | NA | Probable ATP-dependent RNA | DDX5 |
| | | | | helicase DDX5 [40] | |
| VVK(ac)HPIFER (SEQ ID NO: 35) | 0.00 | −0.91 | 0.00 | DnaJ homolog subfamily B member | DNAJB11 |
| | | | | 11 [247] | |
| TCEESSFCK(ac)R (SEQ ID NO: 36) | 0.00 | −0.51 | NA | Isoform 2 of Neutral alpha- | GANAB |
| | | | | glucosidase AB [48] | |
| ASGLAAGK(ac)GVIVAK | 0.00 | 0.46 | 0.00 | Isoform Long of Trifunctional | GART |
| (SEQ ID NO: 37) | | | | purine biosynthetic protein | |
| | | | | adenosine-3 [156] | |
| IIVDELK(ac)QEVISTSSK | 0.00 | −0.62 | 0.00 | Guanine nucleotide-binding | GNB2L1 |
| (SEQ ID NO: 38) | | | | protein subunit beta- | |
| | | | | 2-like 1 [271] | |
| LVK(ac)VWNLANCK | 0.00 | −0.70 | 0.00 | Guanine nucleotide-binding | GNB2L1 |
| (SEQ ID NO: 39) | | | | protein subunit beta- | |
| | | | | 2-like 1 [175] | |
| (ac)AHYNFK(ac)K | 0.00 | −0.38 | 0.00 | Nucleolar GTP-binding | GTPBP4 |
| (SEQ ID NO: 40) | | | | protein 1 [7] | |
| GQQQVFK(ac)GLNDK | 0.00 | 0.46 | 0.00 | Trifunctional enzyme subunit | HADHA |
| (SEQ ID NO: 41) | | | | alpha mitochondrial [406] | |
| K(ac)HPDSSVNFAEFSK | 0.00 | −0.48 | 0.00 | High mobility group protein | HMGB2 |
| (SEQ ID NO: 42) | | | | B2 [30] | |
| RGEEGHDPK(ac)EPEQLR | 0.00 | −0.45 | 0.00 | Isoform 1 of Heterogeneous nuclear | HNRNPA3 |
| (SEQ ID NO: 43) | | | | ribonucleoprotein A3 [29] | |
| AFITNIPFDVK(ac)WQSLK | 0.00 | −0.48 | 0.00 | Isoform 1 of Heterogeneous nuclear | HNRNPM |
| (SEQ ID NO: 44) | | | | ribonucleoprotein M [83] | |
| VK(ac)VLFVR (SEQ ID NO: 45) | 0.00 | −0.77 | 0.00 | Isoform 1 of Heterogeneous nuclear | HNRNPR |
| | | | | ribonucleoprotein R [341] | |
| GYFEYIEENK(ac)YSR | 0.00 | −0.60 | 0.00 | Isoform Short of Heterogeneous | HNRNPU |
| (SEQ ID NO: 46) | | | | nuclear ribonucleoprotein U [246] | |
| TTWVTK(ac)HAAENPGK | 0.00 | −0.56 | 0.00 | Isoform Short of Heterogeneous | HNRNPU |
| (SEQ ID NO: 47) | | | | nuclear ribonucleoprotein U [497] | |
| EELVK(ac)NLGTIAK | 0.00 | −0.60 | NA | Endoplasmin [161] | HSP90B1 |
| (SEQ ID NO: 48) | | | | | |
| ELISNASDALDK(ac)IR | 0.00 | −0.53 | 0.00 | Endoplasmin [114] | HSP90B1 |
| (SEQ ID NO: 49) | | | | | |
| ETLQQHK(ac)LLK (SEQ ID NO: 50) | 0.00 | −0.74 | 0.00 | Endoplasmin [455] | HSP90B1 |
| IADDK(ac)YNDTFWK | 0.00 | −0.78 | 0.00 | Endoplasmin [479] | HSP90B1 |
| (SEQ ID NO: 51) | | | | | |
| NK(ac)EIFLR (SEQ ID NO: 52) | 0.00 | −1.00 | 0.00 | Endoplasmin [97] | HSP90B1 |
| IINEPTAAAIAYGLDK(ac)R | 0.00 | −0.54 | NA | 78 kDa glucose-regulated protein | HSPA5 |
| (SEQ ID NO: 53) | | | | [213] | |
| NQLTSNPENTVFDAK(ac)R | 0.00 | −0.74 | 0.00 | 78 kDa glucose-regulated protein | HSPA5 |
| (SEQ ID NO: 54) | | | | [96] | |
| NQVAMNPTNTVFDAK(ac)R | 0.00 | −0.48 | 0.00 | Isoform 1 of Heat shock cognate | HSPA8 |
| (SEQ ID NO: 55) | | | | 71 kDa protein [71] | |
| YAASSYLSLTPEQWK(ac)SHR | 0.00 | −0.63 | 0.00 | IGL @ protein [208] | IGLV2-14, |
| (SEQ ID NO: 56) | | | | | IGLC2 |
| IHLEIK(ac)QLNR (SEQ ID NO: 57) | 0.00 | −0.56 | NA | Protein ERGIC-53 [346] | LMAN1 |
| LYKEELEQTYHAK(ac)LENAR | 0.00 | −0.73 | 0.00 | Lamin-B1 [271] | LMNB1 |
| (SEQ ID NO: 58) | | | | | |
| GFGYK(ac)GSCFHR | 0.00 | −0.45 | 0.00 | peptidyl-prolyl cis-trans | LOC390956 |
| (SEQ ID NO: 59) | | | | isomerase A-like [71] | |
| ICCQFDFK(ac)R (SEQ ID NO: 60) | 0.00 | −0.69 | 0.00 | Alpha-mannosidase 2 [373] | MAN2A1 |
| ADKDYHFK(ac)VDNDENEHQLSLR | 0.00 | −0.64 | 0.00 | Isoform 2 of Nucleophosmin [32] | NPM1 |
| (SEQ ID NO: 61) | | | | | |
| FINYVK(ac)NCFR (SEQ ID NO: 62) | 0.00 | −0.52 | NA | Isoform 2 of Nucleophosmin [244] | NPM1 |
| SGVGNVFIK(ac)NLDK | 0.00 | −0.54 | NA | Isoform 1 of Polyadenylate- | PABPC4 |
| (SEQ ID NO: 63) | | | | binding protein 4 [104] | |
| GEK(ac)FVMQEEFSR | 0.00 | −0.58 | 0.00 | Protein disulfide-isomerase | PDIA3 |
| (SEQ ID NO: 64) | | | | A3 [335] | |
| PSHLTNK(ac)FEDK | 0.00 | −0.63 | 0.00 | Protein disulfide-isomerase | PDIA3 |
| (SEQ ID NO: 65) | | | | A3 [214] | |
| YGVSGYPTLK(ac)IFR | 0.00 | −0.60 | NA | Protein disulfide-isomerase | PDIA3 |
| (SEQ ID NO: 66) | | | | A3 [104] | |
| SLLGK(ac)DVLFLK | 0.00 | 0.38 | 0.00 | Phosphoglycerate kinase 1 [91] | PGK1 |
| (SEQ ID NO: 67) | | | | | |
| SIYGEK(ac)FEDENFILK | 0.00 | −0.67 | 0.00 | Peptidyl-prolyl cis-trans | PPIA |
| (SEQ ID NO: 68) | | | | isomerase A [82] | |
| TVPK(ac)TVDNFVALATGEK | 0.00 | −0.49 | 0.00 | Peptidyl-prolyl cis-trans | PPIB |
| (SEQ ID NO: 69) | | | | isomerase B [71] | |
| VIFGLFGK(ac)TVPK | 0.00 | −0.44 | 0.00 | Peptidyl-prolyl cis-trans | PPIB |
| (SEQ ID NO: 70) | | | | isomerase B [67] | |
| VIK(ac)DFMIQGGDFTR | 0.00 | −0.40 | 0.00 | Peptidyl-prolyl cis-trans | PPIB |
| (SEQ ID NO: 71) | | | | isomerase B [98] | |
| IYGFYDECK(ac)R (SEQ ID NO: 72) | 0.00 | −0.43 | 0.00 | Isoform Gamma-1 of | PPP1CC |
| | | | | Serine/threonine-protein | |
| | | | | phosphatase PP1-gamma catalytic | |
| | | | | subunit [141] | |
| EIDSVK(ac)YLECSALTQR | 0.00 | −0.48 | 0.00 | Ras-related C3 botulinum toxin | RAC2 |
| (SEQ ID NO: 73) | | | | substrate 2 [153] | |
| (ac)ADK(ac)EAAFDDAVEER | 0.00 | 0.71 | NA | Isoform 1 of Histone-binding | RBBP4 |
| (SEQ ID NO: 74) | | | | protein RBBP4 [4] | |
| ACFYNLDK(ac)FR (SEQ ID NO: 75) | 0.00 | −0.42 | NA | Splicing factor 45 [391] | RBM17 |
| LGLGEGAEEK(ac)SIPTLISR | 0.00 | −0.45 | NA | Isoform 2 of Regulator of | RCC1 |
| (SEQ ID NO: 76) | | | | chromosome condensation [366] | |
| TGCIGAK(ac)HR (SEQ ID NO: 77) | 0.00 | −0.47 | NA | Isoform 1 of 60S ribosomal | RPL11 |
| | | | | protein L11 [154] | |
| WFQQK(ac)YDGIILPGK | 0.00 | −0.64 | NA | Isoform 1 of 60S ribosomal | RPL11 |
| (SEQ ID NO: 78) | | | | protein L11 [169] | |
| IFAPNHVVAK(ac)SR | 0.00 | −0.51 | 0.00 | 60S ribosomal protein | RPL18A |
| (SEQ ID NO: 79) | | | | L18a [41] | |
| IEHIK(ac)HSK (SEQ ID NO: 80) | 0.00 | −0.44 | NA | 60S ribosomal protein | RPL21, |
| | | | | L21 [97] | SNORD102, |
| | | | | | SNORA27, |
| | | | | | RPL21P19 |
| YLK(ac)YLTK (SEQ ID NO: 81) | 0.00 | −0.38 | 0.00 | 60S ribosomal protein L22 [84] | RPL22 |
| INFDK(ac)YHPGYFGK | 0.00 | −0.52 | 0.00 | 60S ribosomal protein L27a [47] | RPL27A |
| (SEQ ID NO: 82) | | | | | |
| FIDTTSK(ac)FGHGR | 0.00 | −0.45 | 0.00 | 60S ribosomal protein | RPL3L |
| (SEQ ID NO: 83) | | | | L3-like [373] | |
| AASLK(ac)SNYNLPMHK | 0.00 | −0.57 | 0.00 | 60S ribosomal protein L4 [274] | RPL4 |
| (SEQ ID NO: 84) | | | | | |
| LNILK(ac)LAPGGHVGR | 0.00 | −0.48 | NA | 60S ribosomal protein L4 [239] | RPL4 |
| (SEQ ID NO: 85) | | | | | |
| NFLGEK(ac)YIR (SEQ ID NO: 86) | 0.00 | −0.44 | 0.00 | 60S ribosomal protein L9 [121] | RPL9 |
| VANVSLLALYK(ac)GK | 0.00 | −0.46 | 0.00 | 40S ribosomal protein S23 [135] | RPS23 |
| (SEQ ID NO: 87) | | | | | |
| LAVLK(ac)YYK (SEQ ID NO: 88) | 0.00 | −0.52 | 0.00 | Ubiquitin-40S ribosomal protein | RPS27A |
| | | | | S27a [104] | |
| LK(ac)YALTGDEVKK | 0.00 | −0.38 | 0.00 | 40S ribosomal protein S4 X | RPS4X |
| (SEQ ID NO: 89) | | | | isoform [53] | |
| SFQK(ac)IQVR (SEQ ID NO: 90) | 0.00 | −0.51 | 0.00 | 40S ribosomal protein S7 [74] | RPS7 |
| ELLTLDEK(ac)DPR | 0.00 | −0.52 | NA | 40S ribosomal protein S9 [66] | RPS9 |
| (SEQ ID NO: 91) | | | | | |
| LQTQVFK(ac)LGLAK | 0.00 | −0.51 | NA | 40S ribosomal protein S9 [116] | RPS9 |
| (SEQ ID NO: 92) | | | | | |
| (ac)ATETVELHK(ac)LK | 0.00 | −0.85 | 0.00 | SAP domain-containing | SARNP |
| (SEQ ID NO: 93) | | | | ribonucleoprotein [10] | |
| LAELK(ac)QECLAR | 0.00 | −0.73 | 0.00 | SAP domain-containing | SARNP |
| (SEQ ID NO: 94) | | | | ribonucleoprotein 17] | |
| ANLVFK(ac)EIEK (SEQ ID NO: 95) | 0.00 | −0.49 | NA | Isoform SCPx of Non-speific | SCP2 |
| | | | | lipid-transfer protein [438] | |
| EGQNWLEK(ac)K (SEQ ID NO: 96) | 0.00 | 0.48 | NA | Signal peptidase complex catalytic | SEC11C |
| | | | | subunit SEC11C [147] | |
| GFGFIK(ac)LESR (SEQ ID NO: 97) | 0.00 | −0.60 | NA | Isoform Long of Splicing factor | SFPQ |
| | | | | proline- and glutamine-rich [338] | |
| LFAK(ac)YGEPGEVFINK | 0.00 | −0.38 | 0.00 | Isoform Long of Splicing factor | SFPQ |
| (SEQ ID NO: 98) | | | | proline- and glutamine-rich [319] | |
| YGEPGEVFINK(ac)GK | 0.00 | −0.43 | NA | Isoform Long of Splicing factor | SFPQ |
| (SEQ ID NO: 99) | | | | proline- and glutamine-rich [330] | |
| YIYDSAFHPDTGEK(ac)MILIGR | 0.00 | 0.55 | 0.00 | Sideroflexin-1 [86] | SFXN1 |
| (SEQ ID NO: 100) | | | | | |
| LVESLPQEIK(ac)ANVAK | 0.00 | −0.56 | 0.00 | cDNA FLJ60124 highly similar to | SLC25A10 |
| (SEQ ID NO: 101) | | | | Mitochondrial dicarboxylate | |
| | | | | carrier [173] | |
| AFFK(ac)GAWSNVLR | 0.00 | 0.45 | 0.00 | ADP/ATP translocase 2 [272] | SLC25A5 |
| (SEQ ID NO: 102) | | | | | |
| YFPTQALNFAFK(ac)DK | 0.00 | 0.58 | 0.00 | ADP/ATP translocase 2 [92] | SLC25A5 |
| (SEQ ID NO: 103) | | | | | |
| TWEK(ac)LLLAAR | 0.00 | −0.45 | 0.00 | 33 kDa protein [57] | SNORA6, |
| (SEQ ID NO: 104) | | | | | RPSAP15, |
| | | | | | SNORA62, |
| | | | | | RPSA |
| YLMEEDEDAYK(ac)K | 0.00 | −0.42 | NA | 60S ribosomal protein L5 [220] | SNORD21, |
| (SEQ ID NO: 105) | | | | | RPL5 |
| TVFAEHISDECK(ac)R | 0.00 | −0.46 | NA | 60S ribosomal protein L3 [115] | SNORD43, |
| (SEQ ID NO: 106) | | | | | RPL3 |
| TKDIEDVFYK(ac)YGAIR | 0.00 | −0.64 | 0.00 | Isoform ASF-1 of Serine/arginine- | SRSF1 |
| (SEQ ID NO: 107) | | | | rich splicing factor 1 [38] | |
| (ac)AEPSAPESK(ac)HK | 0.00 | −0.42 | 0.00 | Dolichyl-diphosphooligosaccharide-- | STT3B |
| (SEQ ID NO: 108) | | | | protein glycosyltransferase | |
| | | | | subunit STT3B [10] | |
| INVYYNEATGGK(ac)YVPR | 0.00 | −0.43 | 0.00 | Tubulin beta-2C chain [58] | TUBB2C |
| (SEQ ID NO: 109) | | | | | |
| ILAEGGGAK(ac)FK | 0.00 | −0.61 | 0.00 | elongation factor Tu mitochondrial | TUFM |
| (SEQ ID NO: 110) | | | | precursor [91] | |
| QIESK(ac)TAFQEALDAAGDK | 0.00 | −0.70 | 0.00 | Thioredoxin [8] | TXN |
| (SEQ ID NO: 111) | | | | | |
| LFKPGQEAVK(ac)YQGPR | 0.00 | −0.47 | 0.00 | Thioredoxin domain-containing | TXNDC5, |
| (SEQ ID NO: 112) | | | | protein 5 [150] | MUTED, |
| | | | | | MUTED- |
| | | | | | TXNDC5 |
| VYVAK(ac)VDCTAHSDVCSAQGVR | 0.00 | −0.49 | 0.00 | Thioredoxin domain-containing | TXNDC5, |
| (SEQ ID NO: 113) | | | | protein 5 [118] | MUTED, |
| | | | | | MUTED- |
| | | | | | TXNDC5 |
| VVVTK(ac)YCDPDSYHR | 0.00 | −0.43 | 0.00 | Isoform 1 of Splicing factor | U2AF2 |
| (SEQ ID NO: 114) | | | | U2AF 65 kDa subunit [462] | |
| FGIAAK(ac)YQIDPDACFSAK | 0.00 | 0.47 | 0.00 | Voltage-dependent anion-selective | VDAC1 |
| (SEQ ID NO: 115) | | | | channel protein 1 [224] | |
| YK(ac)WCEYGLTFTEK | 0.00 | 0.59 | 0.00 | Isoform 2 of Voltage-dependent | VDAC2 |
| (SEQ ID NO: 116) | | | | anion-selective channel protein | |
| | | | | 2 [63] | |
| YK(ac)VCNYGLTFTQK | 0.00 | 0.40 | 0.00 | Isoform 1 of Voltage-dependent | VDAC3 |
| (SEQ ID NO: 117) | | | | anion-selective channel protein | |
| | | | | 3 [63] | |
| FANYIDK(ac)VR (SEQ ID NO: 118) | 0.00 | −0.65 | 0.00 | Vimentin [120] | VIM |
| ILLAELEQLK(ac)GQGK | 0.00 | −0.82 | 0.00 | Vimentin [139] | VIM |
| (SEQ ID NO: 119) | | | | | |
| LQDEIQNMK(ac)EEMAR | 0.00 | −0.72 | 0.00 | Vimentin [373] | VIM |
| (SEQ ID NO: 120) | | | | | |
| SK(ac)FADLSEAANR | 0.00 | −0.60 | 0.00 | Vimentin [294] | VIM |
| (SEQ ID NO: 121) | | | | | |
| TNEK(ac)VELQELNDR | 0.00 | −0.59 | 0.00 | Vimentin [104] | VIM |
| (SEQ ID NO: 122) | | | | | |
| ALQEK(ac)VEIK (SEQ ID NO: 123) | 0.00 | −0.46 | 0.00 | X-ray repair cross-complementing | XRCC5 |
| | | | | protein 5 [665] | |
| (ac)SIMSYNGGAIMAMK(ac)GK | NA | 1.00 | NA | RcPSMB3 (Fragment) [15] | — |
| (SEQ ID NO: 124) | | | | | |
| NLQK(ac)EVIHR (SEQ ID NO: 125) | NA | 0.54 | 0.00 | Isoform 1 of Peroxisomal acyl- | ACOX1 |
| | | | | coenzyme A oxidase 1 [504] | |
| LVDQSGPPHEPK(ac)FVYQAK | NA | −0.41 | 0.00 | Isoform 2 of Double-stranded RNA- | ADAR |
| (SEQ ID NO: 126) | | | | specific adenosine deaminase [757] | |
| HLSDSINQK(ac)HFEQAIER | NA | −0.39 | 0.00 | AFG3-like protein 2 [543] | AFG3L2 |
| (SEQ ID NO: 127) | | | | | |
| DAISGIGTDEK(ac)CLIEILASR | NA | 0.67 | NA | Annexin A6 [113] | ANXA6 |
| (SEQ ID NO: 128) | | | | | |
| DLMTDLK(ac)SEISGDLAR | NA | 0.42 | 0.00 | Annexin A6 [418] | ANXA6 |
| (SEQ ID NO: 129) | | | | | |
| GTVRPANDFNPDADAK(ac)ALR | NA | 0.44 | NA | Annexin A6 [370] | ANXA6 |
| (SEQ ID NO: 130) | | | | | |
| LENK(ac)MEGIGLK | NA | 0.67 | NA | PRA1 family protein 3 [151] | ARL6IP5 |
| (SEQ ID NO: 131) | | | | | |
| EQEHMINWVEK(ac)HVVQSISTQQEK | NA | 0.77 | 0.00 | ATP synthase subunit b | ATP5F1 |
| (SEQ ID NO: 132) | | | | mitochondrial [221] | |
| LNEQK(ac)LAQLEEAK | NA | 0.72 | 0.00 | ATP synthase subunit b | ATP5F1 |
| (SEQ ID NO: 133) | | | | mitochondrial [131] | |
| YGPFVADFADK(ac)LNEQK | NA | −0.45 | NA | ATP synthase subunit b | ATP5F1 |
| (SEQ ID NO: 134) | | | | mitochondrial [126] | |
| SCAEWVSLSK(ac)AR | NA | 0.75 | NA | Isoform 1 of ATP synthase | ATP5H |
| (SEQ ID NO: 135) | | | | subunit d mitochondrial [109] | |
| VNLQNNPGAMEHFHMK(ac)LFR | NA | 0.52 | 0.00 | B-cell receptor-associated | BCAP31 |
| (SEQ ID NO: 136) | | | | protein 31 [95] | |
| LTALDYHNPAGFNCK(ac)DETEFR | NA | 0.41 | 0.00 | UPF0568 protein C14orf166 [20] | C14orf166 |
| (SEQ ID NO: 137) | | | | | |
| IYFTDSSSK(ac)WQR | NA | −0.59 | NA | Isoform 1 of Adipocyte plasma | C20orf3 |
| (SEQ ID NO: 138) | | | | membrane-associated protein [220] | |
| TPELNLDQFHDK(ac)TPYTIMFGPDK | NA | −0.48 | 0.00 | cDNA FLJ55574 highly similar to | CANX |
| (SEQ ID NO: 139) | | | | Calnexin [217] | |
| YIAK(ac)QESVEER | NA | −0.42 | NA | Isoform 3 of Coiled-coil domain- | CCDC144A |
| (SEQ ID NO: 140) | | | | containing protein 144A [754] | |
| EDQK(ac)PVMDDQR | NA | −0.79 | NA | Isoform 1 of HLA class I | CD74 |
| (SEQ ID NO: 141) | | | | histocompatibility antigen gamma | |
| | | | | chain [14] | |
| SHLIDK(ac)GMLTSTTEDE | NA | −0.78 | NA | Isoform 1 of Phosphatidate | CDS2 |
| (SEQ ID NO: 142) | | | | cytidylyltransferase 2 [435] | |
| (ac)SVFGK(ac)LFGAGGGK | NA | −0.39 | 0.00 | Charged multivesicular body | CHMP4B |
| (SEQ ID NO: 143) | | | | protein 4b [6] | |
| STTELPLTVSYDK(ac)VSLGR | NA | −0.48 | NA | Isoform 1 of Cleft lip and | CLPTM1L |
| (SEQ ID NO: 144) | | | | palate transmembrane protein | |
| | | | | 1-like protein [243] | |
| DCDHADEQK(ac)CYSCGEFGHIQK | NA | −0.38 | 0.00 | Isoform 1 of Cellular nucleic | CNBP |
| (SEQ ID NO: 145) | | | | acid-binding protein [118] | |
| GPIGSIGPK(ac)GIPGEDGYR | NA | −0.80 | NA | Isoform 1 of Collagen alpha-3(VI) | COL6A3 |
| (SEQ ID NO: 146) | | | | chain [2052] | |
| YLLYGEK(ac)GTGK | NA | 0.46 | NA | 28S ribosomal protein S29 | DAP3 |
| (SEQ ID NO: 147) | | | | mitochondrial [130] | |
| NIDPK(ac)PCTPR | NA | 0.80 | 0.00 | Isoform 1 of DAZ-associated | DAZAP1 |
| (SEQ ID NO: 148) | | | | protein 1 [83] | |
| FNQK(ac)GEVYK | NA | 0.39 | 0.00 | Lipoamide acyltransferase component | DBT |
| (SEQ ID NO: 149) | | | | of branched-chain alpha-keto acid | |
| | | | | dehydrogenase complex | |
| | | | | mitochondrial [435] | |
| WVFK(ac)EEGVLR | NA | −0.53 | NA | Dolichyl-diphosphooligosaccharide-- | DDOST |
| (SEQ ID NO: 150) | | | | protein glycosyltransferase 48 kDa | |
| | | | | subunit [301] | |
| SK(ac)EITVR (SEQ ID NO: 151) | NA | −0.69 | NA | Probable ATP-dependent RNA | DDX5 |
| | | | | helicase DDX5 [80] | |
| K(ac)YEDICPSTHNMDVPNIK | NA | −0.56 | 0.00 | Eukaryotic translation | EIF5A2 |
| (SEQ ID NO: 152) | | | | initiation factor 5A-2 [68] | |
| AHPVFYQGTYSQALNDAK(ac)R | NA | −0.48 | NA | FAS-associated factor 2 [167] | FAF2 |
| (SEQ ID NO: 153) | | | | | |
| MPTPVIK(ac)AFGILK | NA | −0.55 | NA | Isoform Mitochondrial of Fumarate | FH |
| (SEQ ID NO: 154) | | | | hydratase mitochondrial [94] | |
| SNFK(ac)TCEESSFCK | NA | −0.42 | NA | Isoform 2 of Neutral alpha- | GANAB |
| (SEQ ID NO: 155) | | | | glucosidase AB [39] | |
| AVIWPQYVK(ac)DR | NA | 0.47 | NA | cDNA FLJ59630 highly similar to | GHITM |
| (SEQ ID NO: 156) | | | | Growth hormone-inducible | |
| | | | | transmembrane protein [124] | |
| EAALEPSMEK(ac)IFK | NA | −0.68 | 0.00 | cDNA FLJ59630 highly similar to | GHITM |
| (SEQ ID NO: 157) | | | | Growth hormone-inducible | |
| | | | | transmembrane protein [76] | |
| TAMK(ac)YNLGLDLR | NA | 0.48 | 0.00 | Glutamate dehydrogenase 1 | GLUD1 |
| (SEQ ID NO: 158) | | | | mitochondrial [527] | |
| NLDK(ac)EYLPIGGLAEFCK | NA | −0.46 | 0.00 | Aspartate aminotransferase | GOT2 |
| (SEQ ID NO: 159) | | | | mitochondrial [94] | |
| DSGNK(ac)PPGLLPR | NA | 0.47 | NA | Isoform 1 of Glutathione S- | GSTK1 |
| (SEQ ID NO: 160) | | | | transferase kappa 1 [54] | |
| GDASK(ac)EDIDTAMK | NA | 0.47 | 0.00 | Isoform 1 of Hydroxyacyl-coenzyme | HADH |
| (SEQ ID NO: 161) | | | | A dehydrogenase mitochondrial | |
| | | | | [241] | |
| GFGGK(ac)YGVER | NA | 0.77 | 0.00 | Hematopoietic lineage cell- | HCLS1 |
| (SEQ ID NO: 162) | | | | specific protein [123] | |
| YLENGK(ac)ETLQR | NA | −0.46 | 0.00 | Putative HLA class I histocompati- | HLA-H |
| (SEQ ID NO: 163) | | | | bility antigen alpha chain H | |
| | | | | [200] | |
| K(ac)HPDASVNFSEFSK | NA | −0.39 | 0.00 | Similar to nonhistone chromosomal | HMGB1P4 |
| (SEQ ID NO: 164) | | | | protein HMG-1 [30] | |
| GFAFVTFDDHDSVDK(ac)IVIQK | NA | −0.53 | 0.00 | Isoform A1-B of Heterogeneous | HNRNPA1 |
| (SEQ ID NO: 165) | | | | nuclear ribonucleoprotein A1 [161] | |
| IFVGGLSPDTPEEK(ac)IR | NA | −0.78 | NA | Isoform 1 of Heterogeneous nuclear | HNRNPD |
| (SEQ ID NO: 166) | | | | ribonucleoprotein D0 [197] | |
| ISK(ac)EVLAGR | NA | −0.75 | 0.00 | Isoform Short of Heterogeneous | HNRNPU |
| (SEQ ID NO: 167) | | | | nuclear ribonucleoprotein U [417] | |
| VTEK(ac)IPVR | NA | −0.76 | NA | Isoform Short of Heterogeneous | HNRNPU |
| (SEQ ID NO: 168) | | | | nuclear ribonucleoprotein U [324] | |
| MKENQK(ac)HIYYITGETK | NA | −0.46 | 0.00 | Isoform 2 of Heat shock protein | HSP90AA1 |
| (SEQ ID NO: 169) | | | | HSP 90-alpha [611] | |
| AFYK(ac)SFSK | NA | −1.00 | 0.00 | Endoplasmin [360] | HSP90B1 |
| (SEQ ID NO: 170) | | | | | |
| K(ac)TFEINPR | NA | −0.73 | NA | Endoplasmin [683] | HSP90B1 |
| (SEQ ID NO: 171) | | | | | |
| AVEEK(ac)IEWLESHQDADIEDFK | NA | −0.54 | 0.00 | 78 kDa glucose-regulated protein | HSPA5 |
| (SEQ ID NO: 172) | | | | [601] | |
| DVK(ac)FGADAR | NA | −0.66 | 0.00 | 60 kDa heat shock protein | HSPD1 |
| (SEQ ID NO: 173) | | | | mitochondrial [31] | |
| IGIEIIK(ac)R | NA | −0.42 | NA | 60 kDa heat shock protein | HSPD1 |
| (SEQ ID NO: 174) | | | | mitochondrial [469] | |
| TLNDELEIIEGMK(ac)FDR | NA | −0.45 | NA | 60 kDa heat shock protein | HSPD1 |
| (SEQ ID NO: 175) | | | | mitochondrial [218] | |
| TPVIVTLK(ac)ENER | NA | −0.54 | 0.00 | Hypoxia up-regulated protein | HYOU1 |
| (SEQ ID NO: 176) | | | | 1 [75] | |
| NTILK(ac)AYDGR | NA | −0.49 | NA | Isocitrate dehydrogenase [NADP] | IDH2 |
| (SEQ ID NO: 177) | | | | mitochondrial [256] | |
| HK(ac)DIDILIVR | NA | −1.00 | NA | Isocitrate dehydrogenase [NAD] | IDH3G |
| (SEQ ID NO: 178) | | | | subunit gamma mitochondrial [159] | |
| FEK(ac)EQQQLNWK | NA | −0.47 | NA | Isoform Long of Integrin beta-7 | ITGB7 |
| (SEQ ID NO: 179) | | | | [763] | |
| IGFGSFVDK(ac)TVLPFVSTVPSK | NA | −0.40 | NA | Isoform Long of Integrin beta-7 | ITGB7 |
| (SEQ ID NO: 180) | | | | [199] | |
| EVHK(ac)QVVESAYEVIK | NA | −0.67 | 0.00 | Isoform 1 of L-lactate | LDHA |
| (SEQ ID NO: 181) | | | | dehydrogenase A chain [232] | |
| DK(ac)TQYIFNNMVLK | NA | −0.45 | NA | Alpha-mannosidase 2 [191] | MAN2A1 |
| (SEQ ID NO: 182) | | | | | |
| VALEIFQHSK(ac)YK | NA | 0.64 | NA | Isoform 2 of 39S ribosomal | MRPL39 |
| (SEQ ID NO: 183) | | | | protein L39 mitochondrial | |
| | | | | [234] | |
| DELGDYLK(ac)PK | NA | −0.96 | NA | 39S ribosomal protein L46 | MRPL46 |
| (SEQ ID NO: 184) | | | | mitochondrial [265] | |
| DAAGSGDK(ac)PGADTGR | NA | 0.38 | NA | 39S ribosomal protein L53 | MRPL53 |
| (SEQ ID NO: 185) | | | | mitochondrial [105] | |
| VLK(ac)GNTAEGCVHETQEK | NA | −0.43 | NA | Isoform 1 of Myb-binding protein | MYBBP1A |
| (SEQ ID NO: 186) | | | | 1A [935] | |
| FWNK(ac)FLENK (SEQ ID NO: 187) | NA | 0.54 | 0.00 | NADH dehydrogenase [ubiquinone] | NDUFB6 |
| | | | | 1 beta subcomplex subunit 6 [49] | |
| TYGEIFEK(ac)FHPIR | NA | 1.00 | 0.00 | NADH dehydrogenase [ubiquinone] | NDUFC2 |
| (SEQ ID NO: 188) | | | | 1 subunit C2 [114] | |
| PGGPALWGDAFK(ac)R | NA | 0.77 | NA | Protein NipSnap homolog 3A [166] | NIPSNAP3A |
| (SEQ ID NO: 189) | | | | | |
| QGFNVVVESGAGEASK(ac)FSDDHYR | NA | 0.48 | 0.00 | NAD(P) transhydrogenase | NNT |
| (SEQ ID NO: 190) | | | | mitochondrial [100] | |
| ADK(ac)DYHFK (SEQ ID NO: 191) | NA | −0.60 | 0.00 | Isoform 2 of Nucleophosmin [27] | NPM1 |
| NYEHLFK(ac)VNDK | NA | 1.00 | NA | Mitochondrial import inner | PAM16 |
| (SEQ ID NO: 192) | | | | membrane translocase subunit | |
| | | | | TIM16 [82] | |
| VVVGK(ac)TFDSIVMDPK | NA | −0.80 | 0.00 | Protein disulfide-isomerase A4 | PDIA4 |
| (SEQ ID NO: 193) | | | | [533] | |
| NATVGQSVLNIK(ac)YK | NA | 0.51 | NA | Peroxisome biogenesis factor | PEX2 |
| (SEQ ID NO: 194) | | | | 2 [84] | |
| VLPSIVNEVLK(ac)SVVAK | NA | 1.00 | NA | Prohibitin-2 [142] | PHB2 |
| (SEQ ID NO: 195) | | | | | |
| GDGTGGK(ac)SIYGER | NA | −0.54 | 0.00 | Peptidyl-prolyl cis-trans | PPIB |
| (SEQ ID NO: 196) | | | | isomerase B [116] | |
| GLFIIDDK(ac)GILR | NA | −0.77 | 0.00 | Peroxiredoxin-1 [136] | PRDX1 |
| (SEQ ID NO: 197) | | | | | |
| KLPK(ac)NEPQNATGAPGR | NA | 0.38 | 0.00 | Ras-related protein Rab-5C [184] | RAB5C |
| (SEQ ID NO: 198) | | | | | |
| AGYNVK(ac)QLFR | NA | 0.45 | NA | Isoform 1 of Ras-related protein | RAB6A |
| (SEQ ID NO: 199) | | | | Rab-6A [164] | |
| FLNAENAQK(ac)FK | NA | −0.68 | 0.00 | Ran-specific GTPase-activating | RANBP1 |
| (SEQ ID NO: 200) | | | | protein [150] | |
| NCMTDLLAK(ac)LEAK | NA | 0.49 | NA | Receptor expression-enhancing | REEP5 |
| (SEQ ID NO: 201) | | | | protein 5 [25] | |
| ADINTK(ac)WAATR | NA | −0.50 | 0.00 | Ribosomal protein L14 variant [85] | RPL14 |
| (SEQ ID NO: 202) | | | | | |
| RPAVK(ac)QFHDSK | NA | −0.54 | 0.00 | 60S ribosomal protein L18a [143] | RPL18A |
| (SEQ ID NO: 203) | | | | | |
| AYGGSMCAK(ac)CVR | NA | 0.40 | NA | 60S ribosomal protein L34 [85] | RPL34 |
| (SEQ ID NO: 204) | | | | | |
| NVTLPAVFK(ac)APIRPDIVNFVHTNLR | NA | −0.48 | NA | 60S ribosomal protein L4 [29] | RPL4 |
| (SEQ ID NO: 205) | | | | | |
| AGVNTVTTLVENK(ac)K | NA | −0.42 | NA | 60S ribosomal protein L7a [150] | RPL7A, |
| (SEQ ID NO: 206) | | | | | SNORD24 |
| GIVK(ac)DIIHDPGR | NA | −0.54 | 0.00 | 60S ribosomal protein L8 [46] | RPL8 |
| (SEQ ID NO: 207) | | | | | |
| GHLENNPALEK(ac)LLPHIR | NA | −0.48 | 0.00 | 60S acidic ribosomal protein | RPLP0 |
| (SEQ ID NO: 208) | | | | P0 [77] | |
| FFTVK(ac)LPVALDPGAK | NA | −0.39 | NA | Dolichyl-diphosphooligosaccharide-- | RPN1 |
| (SEQ ID NO: 209) | | | | protein glycosyltransferase | |
| | | | | subunit 1 precursor [155] | |
| NVESYTK(ac)LGNPTR | NA | −0.88 | NA | Dolichyl-diphosphooligosaccharide-- | RPN1 |
| (SEQ ID NO: 210) | | | | protein glycosyltransferase | |
| | | | | subunit 1 precursor [226] | |
| DLEK(ac)WQNNLLPSR | NA | −0.46 | 0.00 | 40S ribosomal protein 515a [88] | RPS15A |
| (SEQ ID NO: 211) | | | | | |
| IQDK(ac)EGIPPDQQR | NA | −0.50 | 0.00 | Ubiquitin-40S ribosomal protein | RPS27A |
| (SEQ ID NO: 212) | | | | S27a [33] | |
| LIYDTK(ac)GR (SEQ ID NO: 213) | NA | −0.40 | NA | 40S ribosomal protein S4 X | RPS4X |
| | | | | isoform [106] | |
| NKEEAAEYAK(ac)LLAK | NA | 0.53 | NA | 40S ribosomal protein S6 [211] | RPS6 |
| (SEQ ID NO: 214) | | | | | |
| LIK(ac)VHLDK (SEQ ID NO: 215) | NA | −0.50 | 0.00 | 40S ribosomal protein S7 [155] | RPS7 |
| GYLTK(ac)EDLR (SEQ ID NO: 216) | NA | 1.00 | 0.00 | Protein S100-A10 [28] | S100A10 |
| IMK(ac)DLDQCR (SEQ ID NO: 217) | NA | 0.72 | 0.00 | Protein S100-A10 [57] | S100A10 |
| FLTK(ac)GDNNAVDDR | NA | 0.82 | NA | Putative signal peptidase complex | SEC11B |
| (SEQ ID NO: 218) | | | | catalytic subunit SEC11B [101] | |
| FLEVIKPFCVILPEIQK(ac)PER | NA | 0.49 | NA | cDNA FLJ59739 highly similar to | SEC61A1 |
| (SEQ ID NO: 219) | | | | Protein transport protein Sec61 | |
| | | | | subunit alpha isoform 1 [27] | |
| GLSSLLYGSIPK(ac)AAVR | NA | 0.44 | 0.00 | Tricarboxylate transport protein | SLC25A1 |
| (SEQ ID NO: 220) | | | | mitochondrial [97] | |
| LTEAKPVDK(ac)VK | NA | −0.50 | 0.00 | cDNA FLJ60124 highly similar to | SLC25A10 |
| (SEQ ID NO: 221) | | | | Mitochondrial dicarboxylate | |
| | | | | carrier [142] | |
| SLEK(ac)VCADLIR | NA | −0.39 | NA | 40S ribosomal protein S20 [34] | SNORD54, |
| (SEQ ID NO: 222) | | | | | RPS20 |
| EVQTNDLK(ac)EVVNK | NA | −0.60 | 0.00 | 40S ribosomal protein S3a [182] | SNORD73A, |
| (SEQ ID NO: 223) | | | | | RPS3A |
| (ac)SIGVPIK(ac) | NA | 0.40 | 0.00 | Small nuclear ribonucleoprotein Sm | SNRPD3 |
| VLHEAEGHIVTCETNTGEVYR | | | | D3 [8] | |
| (SEQ ID NO: 224) | | | | | |
| AVK(ac)HAEELER | NA | −1.00 | NA | Isoform 2 of Signal recognition | SRP68 |
| (SEQ ID NO: 225) | | | | particle 68 kDa protein [164] | |
| LSLDK(ac)VFR (SEQ ID NO: 226) | NA | −0.41 | 0.00 | Stomatin-like protein 2 [145] | STOML2 |
| HIK(ac)ENDYYTPTGEFR | NA | −0.44 | NA | Dolichyl-diphosphooligosaccharide-- | STT3A |
| (SEQ ID NO: 227) | | | | protein glycosyltransferase | |
| | | | | subunit STT3A [613] | |
| IGGSTDTGK(ac)HIK | NA | −1.00 | NA | Dolichyl-diphosphooligosaccharide-- | STT3A |
| (SEQ ID NO: 228) | | | | protein glycosyltransferase | |
| | | | | subunit STT3A [610] | |
| LFVGSIPK(ac)SK | NA | −0.46 | NA | Isoform 1 of Heterogeneous nuclear | SYNCRIP |
| (SEQ ID NO: 229) | | | | ribonucleoprotein Q [252] | |
| HYEVEILDAK(ac)TR | NA | 0.51 | NA | Isoform 1 of Trans-23-enoyl-CoA | TECR |
| (SEQ ID NO: 230) | | | | reductase [12] | |
| NAVQALIDK(ac)HQR | NA | −0.53 | NA | Isoform 2 of Transmembrane | TMEM68 |
| (SEQ ID NO: 231) | | | | protein 68 [240] | |
| HVFTTFYAK(ac)TK | NA | 0.52 | NA | Isoform 1 of Transmembrane | TMEM70 |
| (SEQ ID NO: 232) | | | | protein 70 mitochondrial [215] | |
| SFEEK(ac)VENLK (SEQ ID NO: 233) | NA | −0.51 | 0.00 | Isoform 1 of Tumor protein | TPD52 |
| | | | | D52 [180] | |
| SDCK(ac)EFSSEAR | NA | −1.00 | NA | Heat shock protein 75 kDa | TRAP1 |
| (SEQ ID NO: 234) | | | | mitochondrial [262] | |
| SVQK(ac)LLDAVDTYIPVPAR | NA | −0.74 | NA | elongation factor Tu mitochondrial | TUFM |
| (SEQ ID NO: 235) | | | | precursor [241] | |
| IGK(ac)VDCTQHYELCSGNQVR | NA | −0.44 | 0.00 | Thioredoxin domain-containing | TXNDC5, |
| (SEQ ID NO: 236) | | | | protein 5 [244] | MUTED, |
| | | | | | MUTED- |
| | | | | | TXNDC5 |
| NK(ac)TEDLEATSEHFK | NA | 0.70 | 0.00 | Vesicle-associated membrane | VAMP8 |
| (SEQ ID NO: 237) | | | | protein 8 [47] | |
| FLK(ac)FGMTPSK | NA | −0.89 | NA | Transitional endoplasmic reticulum | VCP |
| (SEQ ID NO: 238) | | | | ATPase [505] | |
| DIFNK(ac)GFGFGLVK | NA | 0.48 | NA | Isoform 2 of Voltage-dependent | VDAC2 |
| (SEQ ID NO: 239) | | | | anion-selective channel protein | |
| | | | | 2 [20] | |
| GFGFGLVK(ac)LDVK | NA | 0.40 | NA | Isoform 2 of Voltage-dependent | VDAC2 |
| (SEQ ID NO: 240) | | | | anion-selective channel protein | |
| | | | | 2 [28] | |
| FLEQQNK(ac)ILLAELEQLK | NA | −0.52 | 0.00 | Vimentin [129] | VIM |
| (SEQ ID NO: 241) | | | | | |
| KVESLQEEIAFLK(ac)K | NA | −0.68 | 0.00 | Vimentin [235] | VIM |
| (SEQ ID NO: 242) | | | | | |
| FPTAIFESK(ac)GFR | NA | 0.40 | NA | Isoform 4 of Histone-lysine N- | WHSC1L1 |
| (SEQ ID NO: 243) | | | | methyltransferase NSD3 [727] | |
| LHTGEK(ac)PYK (SEQ ID NO: 244) | NA | −0.59 | NA | Zinc finger and SCAN domain- | ZSCAN21 |
| | | | | containing protein 21 [414] | |
| KTPCGEGSK(ac)TWDR | −0.69 | −0.46 | 0.00 | 40S ribosomal protein S20 [75] | SNORD54, |
| (SEQ ID NO: 245) | | | | | RPS20 |
| K(ac)YSQFINFPIYVWSSK | −0.54 | −0.41 | 0.00 | Endoplasmin [270] | HSP90B1 |
| (SEQ ID NO: 246) | | | | | |
| PLISVYSEK(ac)GESSGK | −0.54 | −0.38 | NA | 60S ribosomal protein L4 [14] | RPL4 |
| (SEQ ID NO: 247) | | | | | |
| ALDLNLK(ac)HQILPK | −0.50 | 0.46 | 0.00 | Cytochrome b-c1 complex subunit | UQCRB |
| (SEQ ID NO: 248) | | | | 7 [72] | |
| IGQGYLIK(ac)DGK | −0.44 | −0.46 | 0.00 | 60S ribosomal protein L3 [294] | SNORD43, |
| (SEQ ID NO: 249) | | | | | RPL3 |
| VGIVGK(ac)YGTR | −0.44 | −0.56 | 0.00 | 60S ribosomal protein L37a [13] | RPL37A |
| (SEQ ID NO: 250) | | | | | |
| LYATMEK(ac)HK (SEQ ID NO: 251) | −0.43 | 0.38 | 0.00 | Histone acetyltransferase | EP300 |
| | | | | p300 [1590] | |
| TLQYK(ac)LLEPVLLLGK | −0.39 | −0.53 | 0.00 | 40S ribosomal protein S16 [50] | RPS16 |
| (SEQ ID NO: 252) | | | | | |
| FPHSAHQK(ac)YVR | −0.39 | −0.87 | 0.00 | Ribosomal protein L14 variant | RPL14 |
| (SEQ ID NO: 253) | | | | [71] | |
| YNCDK(ac)MICR (SEQ ID NO: 254) | 0.38 | −0.41 | 0.00 | Ubiquitin-605 ribosomal protein | UBA52 |
| | | | | L40 [93] | |
| SK(ac)SDPIMLLK | 0.39 | 0.52 | 0.00 | pyruvate dehydrogenase E1 | PDHA1 |
| (SEQ ID NO: 255) | | | | component subunit alpha somatic | |
| | | | | form mitochondrial isoform 2 | |
| | | | | precursor [351] | |
| NICSK(ac)YSVR (SEQ ID NO: 256) | 0.39 | −0.51 | 0.00 | Thioredoxin domain-containing | TXNDC5, |
| | | | | protein 5 [390] | MUTED, |
| | | | | | MUTED- |
| | | | | | TXNDC5 |
| NVLINK(ac)DIR (SEQ ID NO: 257) | 0.39 | −0.88 | 0.00 | Calreticulin [159] | CALR |
| YQQFK(ac)DFQR (SEQ ID NO: 258) | 0.39 | −0.38 | 0.00 | Isoform 2 of Spliceosome RNA | SNORD84, |
| | | | | helicase DDX39B [349] | DDX39B |
| IPK(ac)HLTDAYFK | 0.40 | −0.63 | NA | 60S ribosomal protein L6 [211] | RPL6 |
| (SEQ ID NO: 259) | | | | | |
| AGLQVYNK(ac)CWK | 0.41 | −0.45 | 0.00 | CD59 glycoprotein [63] | CD59 |
| (SEQ ID NO: 260) | | | | | |
| EVEEDEYK(ac)AFYK | 0.41 | −0.89 | 0.00 | Endoplasmin[ 356] | HSP90B1 |
| (SEQ ID NO: 261) | | | | | |
| AVLK(ac)FAAATGATPIAGR | 0.41 | −0.53 | 0.00 | Laminin receptor-like protein | SNORA6, |
| (SEQ ID NO: 262) | | | | LAMRL5 [89] | RPSAP15, |
| | | | | | SNORA62, |
| | | | | | RPSA |
| FVVEK(ac)AEQQK | 0.42 | 0.62 | 0.00 | Prohibitin [202] | PHB |
| (SEQ ID NO: 263) | | | | | |
| IQEVLK(ac)HAR (SEQ ID NO: 264) | 0.43 | 0.38 | 0.00 | 39S ribosomal protein L20 | MRPL20 |
| | | | | mitochondrial [26] | |
| GSK(ac)FYGPAGPYGIFAGR | 0.43 | −0.45 | NA | membrane-associated progesterone | PGRMC2 |
| (SEQ ID NO: 265) | | | | receptor component 2 [159] | |
| AK(ac)FEELNMDLFR | 0.44 | −0.52 | 0.00 | 78 kDa glucose-regulated protein | HSPA5 |
| (SEQ ID NO: 266) | | | | [326] | |
| NQVALNPQNTVFDAK(ac)R | 0.44 | 0.59 | 0.00 | Heat shock 70 kDa protein 1A/1B | HSPA1B, |
| (SEQ ID NO: 267) | | | | [71] | HSPA1A |
| DGLQNEK(ac)NIVSTPVK | 0.45 | 0.40 | 0.00 | Hydroxymethylglutaryl-CoA lyase | HMGCL |
| (SEQ ID NO: 268) | | | | mitochondrial [48] | |
| TLLIK(ac)TVETR | 0.45 | −0.54 | 0.00 | Vimentin [445] | VIM |
| (SEQ ID NO: 269) | | | | | |
| TKYEK(ac)SLYSMIK | 0.46 | 0.42 | 0.00 | Annexin A6 [299] | ANXA6 |
| (SEQ ID NO: 270) | | | | | |
| QNK(ac)LEQVEK (SEQ ID NO: 271) | 0.46 | 0.45 | 0.00 | ATP synthase subunit O | ATP50 |
| | | | | mitochondrial [54] | |
| ATVPK(ac)TEIR (SEQ ID NO: 272) | 0.47 | −0.44 | 0.00 | Isoform 1 of 40S ribosomal | RPS24 |
| | | | | protein S24 [37] | |
| VHVIFNYK(ac)GK | 0.48 | −0.58 | NA | Calreticulin [151] | CALR |
| (SEQ ID NO: 273) | | | | | |
| YDGK(ac)WEVEEMK | 0.48 | −0.49 | 0.00 | cDNA FLJ55574 highly similar to | CANX |
| (SEQ ID NO: 274) | | | | Calnexin [138] | |
| RMELK(ac)ADQLYK | 0.51 | 0.53 | NA | Pyruvate dehydrogenase E1 | PDHA2 |
| (SEQ ID NO: 275) | | | | component subunit alpha testis- | |
| | | | | specific form mitochondrial [75] | |
| VMEHFIK(ac)LYK | 0.54 | −0.66 | 0.00 | 78 kDa glucose-regulated | HSPA5 |
| (SEQ ID NO: 276) | | | | protein [268] | |
| (ac)AAK(ac)VFESIGK | 0.54 | 0.39 | NA | Prohibitin [4] | PHB |
| (SEQ ID NO: 277) | | | | | |
| GWLK(ac)SNVSDAVAQSTR | 0.54 | −0.41 | 0.00 | triosephosphate isomerase | TPI1, |
| (SEQ ID NO: 278) | | | | isoform 2 [231] | TPI1P1 |
| IVNSAQTGSFK(ac)QLTVK | 0.56 | 0.77 | 0.00 | ATP synthase subunit g | ATP5L |
| (SEQ ID NO: 279) | | | | mitochondrial [66] | |
| IFK(ac)SDGLR (SEQ ID NO: 280) | 0.56 | 0.48 | 0.00 | ADP/ATP translocase 1 [166] | SLC25A4 |
| FVLSSGK(ac)FYGDEEKDK | 0.58 | −0.51 | 0.00 | Calreticulin [55] | CALR |
| (SEQ ID NO: 281) | | | | | |
| AINEAYK(ac)EDYHK | 0.59 | 0.53 | 0.00 | Annexin A6 [478] | ANXA6 |
| (SEQ ID NO: 282) | | | | | |
| (ac)AEYLASIFGTEK(ac)DK | 0.60 | 0.60 | NA | Splicing factor U2AF 35 kDa | U2AF1 |
| (SEQ ID NO: 283) | | | | subunit [13] | |
| AISPDK(ac)DNFYFDVK | 0.61 | 0.40 | 0.00 | NAD(P) transhydrogenase | NNT |
| (SEQ ID NO: 284) | | | | mitochondrial [403] | |
| NDTSGEYK(ac)K (SEQ ID NO: 285) | 0.61 | 0.70 | NA | Annexin A6 [314] | ANXA6 |
| NFEDVAFDEK(ac)K | 0.62 | −0.41 | 0.00 | Protein disulfide-isomerase [385] | P4HB |
| (SEQ ID NO: 286) | | | | | |
| FK(ac)LITEDVQGK | 0.62 | −0.66 | NA | 40S ribosomal protein S3a [85] | SNORD73A, |
| (SEQ ID NO: 287) | | | | | RPS3A |
| EIFQNEK(ac)R (SEQ ID NO: 288) | 0.64 | 0.55 | 0.00 | NAD(P) transhydrogenase | NNT |
| | | | | mitochondrial [70] | |
| TCDLVGEK(ac)GK | 0.65 | −0.81 | NA | Cation-dependent mannose-6- | M6PR |
| (SEQ ID NO: 289) | | | | phosphate receptor [38] | |
| VPVPEDK(ac)YTAQVDAEEKEDVK | 0.66 | 0.50 | 0.00 | Isoform 1 of ATP synthase | ATP5H |
| (SEQ ID NO: 290) | | | | subunit d mitochondrial [85] | |
| ILMSK(ac)PVLSGGTGR | 0.67 | 0.65 | NA | cDNA FLJ55380 highly similar to | ZMYND8 |
| (SEQ ID NO: 291) | | | | Protein kinase C-binding protein | |
| | | | | 1 [440] | |
| SAYFAEK(ac)LYK | 0.67 | 0.62 | NA | annexin A4 [255] | ANXA4 |
| (SEQ ID NO: 292) | | | | | |
| YFLDK(ac)TLTSR | 0.68 | 0.50 | NA | [3-methyl-2-oxobutanoate | BCKDK |
| (SEQ ID NO: 293) | | | | dehydrogenase [lipoamide]] kinase | |
| | | | | mitochondrial [192] | |
| VLSK(ac)EFHLNESGDPSSK | 0.69 | −1.00 | 0.00 | Isoform 1 of Protein SET [154] | SET |
| (SEQ ID NO: 294) | | | | | |
| SEVDMLK(ac)IR (SEQ ID NO: 295) | 0.71 | 0.41 | 0.00 | Putative annexin A2-like | ANXA2P2 |
| | | | | protein [302] | |
| LVAENK(ac)FGK (SEQ ID NO: 296) | 0.74 | −0.43 | 0.00 | Isoform 1 of Hydroxyacyl-coenzyme | HADH |
| | | | | A dehydrogenase mitochondrial | |
| | | | | [301] | |
| THILLFLPK(ac)SVSDYDGK | 0.75 | −0.45 | 0.00 | Protein disulfide-isomerase [263] | P4HB |
| (SEQ ID NO: 297) | | | | | |
| NKPLFFADK(ac)LYK | 0.78 | 0.51 | 0.00 | Annexin A6 [607] | ANXA6 |
| (SEQ ID NO: 298) | | | | | |
| ISK(ac)EEAMR (SEQ ID NO: 299) | 0.84 | −0.48 | 0.00 | Isoform 1 of 60S ribosomal | RPL11 |
| | | | | protein L11 [159] | |
| AIFAGYK(ac)R (SEQ ID NO: 300) | 0.86 | 0.44 | NA | 60S ribosomal protein L35a [15] | RPL35A |
| AGLVDDFEK(ac)K | 0.86 | 0.66 | NA | Isoform 1 of ATP synthase | ATP5H |
| (SEQ ID NO: 301) | | | | subunit d mitochondrial [72] | |
| LLEQYK(ac)EESK | 0.89 | −0.57 | NA | Isoform Short of Heterogeneous | HNRNPU |
| (SEQ ID NO: 302) | | | | nuclear ribonucleoprotein U [651] | |
| VLVGK(ac)NFEDVAFDEK | 0.99 | −0.41 | 0.00 | Protein disulfide-isomerase [375] | P4HB |
| (SEQ ID NO: 303) | | | | | |
| LEMSYSK(ac)FK (SEQ ID NO: 304) | 1.00 | 0.48 | NA | Isoform 1 of UDP-N- | DPAGT1 |
| | | | | acetylglucosamine--dolichyl- | |
| | | | | phosphate N- | |
| | | | | acetylglucosaminephospho- | |
| | | | | transferase [320] | |
| PAQGAK(ac)YR (SEQ ID NO: 305) | 1.00 | 0.39 | NA | Annexin A6 [9] | ANXA6 |
| IFGSNK(ac)WTTEQQQR | 1.00 | 0.45 | NA | ADP-ribosylation factor-like | ARL6IP1 |
| (SEQ ID NO: 306) | | | | protein 6-interacting protein | |
| | | | | 1 [96] | |
| HVVQSISTQQEK(ac)ETIAK | 1.00 | 0.62 | 0.00 | ATP synthase subunit b | ATP5F1 |
| (SEQ ID NO: 307) | | | | mitochondrial [233] | |
| VPGK(ac)DTVTK (SEQ ID NO: 308) | 1.00 | 0.40 | 0.00 | Trifunctional enzyme subunit beta | HADHB |
| | | | | mitochondrial [272] | |
| PEPAK(ac)SAPAPK(ac)K | 1.00 | 0.58 | 0.00 | Histone H2B type 2-E [6:12] | HIST2H2BE |
| (SEQ ID NO: 309) | | | | | |
| K(ac)STGGK(ac)APR | 1.00 | 0.46 | 0.00 | Histone H3.2 [10:15] | HIST2H3D, |
| (SEQ ID NO: 310) | | | | | HIST2H3A, |
| | | | | | HIST2H3C |
| GK(ac)GGK(ac)GLGK | 1.00 | 0.49 | 0.00 | Histone H4 [6:9] | HIST2H4B, |
| (SEQ ID NO: 311) | | | | | HIST1H4C, |
| | | | | | HIST1H4J, |
| | | | | | HIST1H4D, |
| | | | | | HIST1H4A, |
| | | | | | HIST2H4A, |
| | | | | | HIST1H4I, |
| | | | | | HIST1H4K, |
| | | | | | HIST1H4E, |
| | | | | | HIST1H4L, |
| | | | | | HIST1H4F, |
| | | | | | HIST1H4H, |
| | | | | | HIST4H4, |
| | | | | | HIST1H4B |
| GLGK(ac)GGAK(ac)R | 1.00 | 0.49 | 0.00 | Histone H4 [13:17] | HIST2H4B, |
| (SEQ ID NO: 312) | | | | | HIST1H4C, |
| | | | | | HIST1H4J, |
| | | | | | HIST1H4D, |
| | | | | | HIST1H4A, |
| | | | | | HIST2H4A, |
| | | | | | HIST1H4I, |
| | | | | | HIST1H4K, |
| | | | | | HIST1H4E, |
| | | | | | HIST1H4L, |
| | | | | | HIST1H4F, |
| | | | | | HIST1H4H, |
| | | | | | HIST4H4, |
| | | | | | HIST1H4B |
| GLGK(ac)GGAKR | 1.00 | −0.62 | 0.00 | Histone H4 [13] | HIST2H4B, |
| (SEQ ID NO: 313) | | | | | HIST1H4C, |
| | | | | | HIST1H4J, |
| | | | | | HIST1H4D, |
| | | | | | HIST1H4A, |
| | | | | | HIST2H4A, |
| | | | | | HIST1H4I, |
| | | | | | HIST1H4K, |
| | | | | | HIST1H4E, |
| | | | | | HIST1H4L, |
| | | | | | HIST1H4F, |
| | | | | | HIST1H4H, |
| | | | | | HIST4H4, |
| | | | | | HIST1H4B |
| EK(ac)NLLHVTDTGVGMTR | 1.00 | −0.84 | 0.00 | Endoplasmin[ 142] | HSP90B1 |
| (SEQ ID NO: 314) | | | | | |
| KSDYIK(ac)LYVR | 1.00 | −0.70 | 0.00 | Endoplasmin [410] | HSP90B1 |
| (SEQ ID NO: 315) | | | | | |
| K(ac)SADTLWGIQK | 1.00 | 1.00 | 0.00 | Isoform 1 of L-lactate dehy- | LDHA |
| (SEQ ID NO: 316) | | | | drogenase A chain [318] | |
| IVADK(ac)DYSVTANSK | 1.00 | 0.51 | 0.00 | L-lactate dehydrogenase | LDHB |
| (SEQ ID NO: 317) | | | | B chain [82] | |
| VVDSMDALDK(ac)VVQER | 1.00 | 0.45 | 0.00 | Isoform 1 of 39S ribosomal | MRPL47 |
| (SEQ ID NO: 318) | | | | protein L47 mitochondrial [144] | |
| YSAK(ac)DYFFK (SEQ ID NO: 319) | 1.00 | 0.44 | NA | Alpha-soluble NSF attachment | NAPA |
| | | | | protein [203] | |
| GIVLEK(ac)VGVEAK | 1.00 | −0.55 | NA | 40S ribosomal protein S23 [54] | RPS23 |
| (SEQ ID NO: 320) | | | | | |
| DLQQYQSQAK(ac)QLFR | 1.00 | 0.46 | NA | Vesicle-trafficking protein | SEC22B |
| (SEQ ID NO: 321) | | | | SEC22b [38] | |
| LLASK(ac)SLLNR | 1.00 | −0.59 | NA | cDNA FLJ56303 highly similar to | SSR2 |
| (SEQ ID NO: 322) | | | | Translocon-associated protein | |
| | | | | subunit beta [46] | |
| TMSCSDK(ac)ILR | 0.00 | NA | −0.65 | Isoform 2 of Double-stranded RNA- | ADAR |
| (SEQ ID NO: 323) | | | | specific adenosine deaminase | |
| | | | | [1013] | |
| MVAAAK(ac)YAR (SEQ ID NO: 324) | 0.00 | 0.00 | −0.80 | Isoform Heart of ATP synthase | ATP5C1 |
| | | | | subunit gamma mitochondrial [55] | |
| FEDPK(ac)FEVIEKPQA | 0.00 | 0.00 | −0.50 | ATP synthase-coupling factor 6 | ATP5J |
| (SEQ ID NO: 325) | | | | mitochondrial [99] | |
| VQDGLSDIAEK(ac)FLK | 0.00 | 0.00 | 0.89 | Isoform 5 of Transcriptional | ATRX |
| (SEQ ID NO: 326) | | | | regulator ATRX [812] | |
| LNK(ac)PFLFDTK | 0.00 | 0.00 | 0.43 | cDNA FLJ55574 highly similar to | CANX |
| (SEQ ID NO: 327) | | | | Calnexin [172] | |
| AAEEVEAK(ac)FK | 0.00 | 0.00 | −0.42 | Coiled-coil-helix-coiled-coil- | CHCHD3 |
| (SEQ ID NO: 328) | | | | helix domain-containing | |
| | | | | protein 3 mitochondrial [173] | |
| SLLK(ac)PFCAALLK | 0.00 | NA | 0.48 | Isoform 1 of Cytoskeleton- | CKAP5 |
| (SEQ ID NO: 329) | | | | associated protein 5 [438] | |
| SMSTEGLMK(ac)FVDSK | 0.00 | NA | 0.76 | Citrate synthase mitochondrial | CS |
| (SEQ ID NO: 330) | | | | [459] | |
| YNIEK(ac)DIAAYIK | 0.00 | 0.00 | −0.45 | Dynein light chain 2 cytoplasmic | DYNLL2 |
| (SEQ ID NO: 331) | | | | [36] | |
| YLAEK(ac)YEWDVAEAR | 0.00 | NA | −0.40 | Elongation factor 2 [638] | EEF2 |
| (SEQ ID NO: 332) | | | | | |
| FK(ac)ILDAVVAQEPLHR | 0.00 | NA | −0.99 | 116 kDa U5 small nuclear | EFTUD2 |
| (SEQ ID NO: 333) | | | | ribonucleoprotein component [790] | |
| LEAMCFDGVK(ac)R | 0.00 | NA | −0.40 | S1 IF1 type family protein [56] | EIF1AXP1 |
| (SEQ ID NO: 334) | | | | | |
| LMCK(ac)PIFSK (SEQ ID NO: 335) | 0.00 | NA | 0.49 | Eukaryotic translation initiation | EIF2S3 |
| | | | | factor 2 subunit 3 [312] | |
| SNPSEVVEFTTCPDK(ac)PGIPVKPSVK | 0.00 | 0.00 | 0.40 | Isoform 2 of Fibronectin type-III | FNDC3A |
| (SEQ ID NO: 336) | | | | domain-containing protein 3A [507] | |
| EIAQEFK(ac)TDLR | 0.00 | NA | −0.49 | histone cluster 2 H3 pseudogene 2 | HIST2H3PS2 |
| (SEQ ID NO: 337) | | | | [80] | |
| APQCLGK(ac)FIEIAAR | 0.00 | 0.00 | 0.75 | Isoform Short of Heterogeneous | HNRNPU |
| (SEQ ID NO: 338) | | | | nuclear ribonucleoprotein U [546] | |
| MMVAGFK(ac)K (SEQ ID NO: 339) | 0.00 | NA | −0.40 | Isoform Short of Heterogeneous | HNRNPU |
| | | | | nuclear ribonucleoprotein U [524] | |
| FEYK(ac)YSFK (SEQ ID NO: 340) | 0.00 | NA | −0.52 | Protein ERGIC-53 [49] | LMAN1 |
| IINEVSK(ac)PLAHHIPVEK | 0.00 | 0.00 | −0.58 | cDNA FLJ77177 highly similar to | MANF |
| (SEQ ID NO: 341) | | | | Homo sapiens arginine-rich | |
| | | | | mutated in early stage tumors | |
| | | | | (ARMET) mRNA [97] | |
| FLNK(ac)LAEER (SEQ ID NO: 342) | 0.00 | NA | −0.44 | Matrin-3 [836] | MATR3, |
| | | | | | SNHG4 |
| VHLSQK(ac)YK (SEQ ID NO: 343) | 0.00 | NA | 0.40 | Matrin-3 [473] | MATR3, |
| | | | | | SNHG4 |
| INK(ac)ALDK (SEQ ID NO: 344) | 0.00 | NA | 0.43 | Isoform 1 of Myosin-9 [435] | MYH9 |
| FCLSK(ac)PGVYK | 0.00 | 0.00 | 0.59 | Nodal modulator 1 [630] | NOMO3, |
| (SEQ ID NO: 345) | | | | | NOMO1 |
| AQNDLIWNIK(ac)DELKK | 0.00 | NA | 0.83 | Poly [ADP-ribose] polymerase | PARP1 |
| (SEQ ID NO: 346) | | | | 1 [249] | |
| FPDENFK(ac)LK (SEQ ID NO: 347) | 0.00 | 0.00 | −1.00 | Peptidyl-prolyl cis-trans | PPIC |
| | | | | isomerase C [123] | |
| TNVPVK(ac)LFAR | 0.00 | 0.00 | 0.39 | cDNA FLJ77422 highly similar to | RALY |
| (SEQ ID NO: 348) | | | | Homo sapiens RNA binding protein | |
| | | | | autoantigenic (hnRNP-associated | |
| | | | | with lethal yellow homolog | |
| | | | | (mouse)) transcript variant | |
| | | | | 1 mRNA (Fragment) [165] | |
| GYAYVEFENPDEAEK(ac)ALK | 0.00 | 0.00 | −0.46 | Isoform 1 of RNA-binding protein | RNPS1 |
| (SEQ ID NO: 349) | | | | with serine-rich domain 1 [218] | |
| VTNLLMLK(ac)GK | 0.00 | NA | 0.83 | regulator of differentiation 1 | ROD1 |
| (SEQ ID NO: 350) | | | | isoform 2 [64] | |
| KIEISQHAK(ac)YTCSFCGK | 0.00 | NA | 0.41 | 60S ribosomal protein L37a [36] | RPL37A |
| (SEQ ID NO: 351) | | | | | |
| DTYIENEK(ac)LISGK | 0.00 | 0.00 | 0.77 | Dolichyl-diphosphooligosaccharide-- | RPN1 |
| (SEQ ID NO: 352) | | | | protein glycosyltransferase | |
| | | | | subunit 1 precursor [626] | |
| KDVHMPK(ac)HPELADK | 0.00 | 0.00 | 0.56 | 40S ribosomal protein S10 [31] | RPS10 |
| (SEQ ID NO: 353) | | | | | |
| TFEK(ac)SMMNLQTK | 0.00 | NA | 0.46 | DNA topoisomerase 1 [642] | TOP1 |
| (SEQ ID NO: 354) | | | | | |
| KQELLEALTK(ac)HFQD | 0.00 | 0.00 | −0.74 | X-ray repair cross-complementing | XRCC6 |
| (SEQ ID NO: 355) | | | | protein 6 [605] | |
| NFK(ac)SISK (SEQ ID NO: 356) | NA | NA | 0.44 | cDNA FLJ56425 highly similar to | ACADVL |
| | | | | Very-long-chain specific acyl- | |
| | | | | CoAdehydrogenase mitochondrial | |
| | | | | [681] | |
| TNFSNEK(ac)TISK | NA | NA | 0.84 | Acylphosphatase-2 [113] | ACYP2 |
| (SEQ ID NO: 357) | | | | | |
| K(ac)YGKSLYYYIQQDTK | NA | NA | 0.66 | Putative annexin A2-like | ANXA2P2 |
| (SEQ ID NO: 358) | | | | protein [310] | |
| RPEILK(ac)QEIK | NA | NA | 0.57 | Isoform 1 of AP-2 complex | AP2B1 |
| (SEQ ID NO: 359) | | | | subunit beta [318] | |
| ELQEMDKDDESLIK(ac)YK | NA | NA | 0.60 | Rho GDP-dissociation inhibitor | ARHGDIB |
| (SEQ ID NO: 360) | | | | 2 [47] | |
| NAYVWTLK(ac)GR | NA | NA | −1.00 | Actin-related protein 2/3 complex | ARPC1B, |
| (SEQ ID NO: 361) | | | | subunit 1B [82] | ARPC1A |
| VFDPQNDK(ac)PSKWWTCFVK | NA | NA | 0.45 | Actin-related protein 2/3 complex | ARPC3 |
| (SEQ ID NO: 362) | | | | subunit 3 [155] | |
| VLISFK(ac)ANDIEK | NA | NA | 0.42 | Isoform 2 of Actin-related | ARPC5 |
| (SEQ ID NO: 363) | | | | protein 2/3 complex subunit | |
| | | | | 5 [90] | |
| LAALPENPPAIDWAYYK(ac)ANVAK | NA | NA | 0.48 | Isoform 1 of ATP synthase | ATP5H |
| (SEQ ID NO: 364) | | | | subunit d mitochondrial | |
| | | | | [58] | |
| ELDPIQK(ac)LFVDK | NA | 0.00 | −0.48 | ATP synthase-coupling factor 6 | ATP5J |
| (SEQ ID NO: 365) | | | | mitochondrial [41] | |
| GHCPPAPAK(ac)PMHPENK(ac)LTNHGK | NA | NA | 0.63 | Isoform 1 of B-cell CLL/lymphoma | BCL9L |
| (SEQ ID NO: 366) | | | | 9-like protein [36:43] | |
| LVGELK(ac)LDR (SEQ ID NO: 367) | NA | NA | −0.52 | Bactericidal/permeability- | BPI |
| | | | | increasing protein [237] | |
| SNYK(ac)MMFVK (SEQ ID NO: 368) | NA | NA | −0.45 | Small acidic protein [174] | C11orf58 |
| K(ac)HDSGAADLER | NA | NA | 1.00 | Isoform 2 of Huntingtin- | C15orf63 |
| (SEQ ID NO: 369) | | | | interacting protein K [35] | |
| AELSK(ac)LVIVAK | NA | NA | 1.00 | UPF0556 protein C19orf10 [161] | C19orf10 |
| (SEQ ID NO: 370) | | | | | |
| LHSNYYK(ac)HK (SEQ ID NO: 371) | NA | NA | 0.52 | Uncharacterized protein C6orf125 | C6orf125 |
| | | | | [69] | |
| GQTLVVQFTVK(ac)HEQNIDCGGGYVK | NA | NA | −0.43 | Calreticulin [98] | CALR |
| (SEQ ID NO: 372) | | | | | |
| K(ac)VCGDSDKGFVVINQK | NA | NA | 0.67 | T-complex protein 1 subunit zeta | CCT6A |
| (SEQ ID NO: 373) | | | | [280] | |
| (ac)MEDYTK(ac)IEK | NA | NA | −0.51 | Isoform 2 of Cyclin-dependent | CDK1 |
| (SEQ ID NO: 374) | | | | kinase 1 [6] | |
| LK(ac)ADVFK (SEQ ID NO: 375) | NA | NA | −0.45 | Isoform 1 of Chromodomain- | CHD4 |
| | | | | helicase-DNA-binding | |
| | | | | protein 4 [959] | |
| (ac)SNMEK(ac)HLFNLK | NA | NA | 0.85 | Charged multivesicular body | CHMP1B |
| (SEQ ID NO: 376) | | | | protein 1b [6] | |
| GK(ac)YMLVR (SEQ ID NO: 377) | NA | NA | 1.00 | Carbohydrate sulfotransferase | CHST1 |
| | | | | 1 [296] | |
| FLDGNEMTLADCNLLPK(ac)LHIVK | NA | NA | 0.51 | Chloride intracellular channel | CLIC4 |
| (SEQ ID NO: 378) | | | | protein 4 [194] | |
| (ac)SSNECFK(ac)CGR | NA | 0.00 | −0.82 | Isoform 1 of Cellular nucleic | CNBP |
| (SEQ ID NO: 379) | | | | acid-binding protein [8] | |
| NLK(ac)NEITK (SEQ ID NO: 380) | NA | NA | 0.40 | Isoform 1 of Coatomer subunit | COPA |
| | | | | alpha [441] | |
| DHPLPEVAHVK(ac)HLSASQK | NA | 0.00 | −0.63 | Cytochrome c oxidase subunit 4 | COX4I1 |
| (SEQ ID NO: 381) | | | | isoform 1 mitochondrial [53] | |
| NLPFSVENK(ac)WSLLAK | NA | NA | −0.87 | Cytochrome c oxidase subunit 7C | COX7C |
| (SEQ ID NO: 382) | | | | mitochondrial [34] | |
| GLESTTLADK(ac)DGEIYCK | NA | NA | −0.67 | Cysteine and glycine-rich | CSRP1 |
| (SEQ ID NO: 383) | | | | protein 1 [161] | |
| HTENVAK(ac)FHCPHCDTVIAR | NA | NA | −0.66 | Transcriptional repressor CTCF | CTCF |
| (SEQ ID NO: 384) | | | | [436] | |
| LHYK(ac)HESWLLHR | NA | NA | −0.43 | Deoxycytidine kinase [211] | DCK |
| (SEQ ID NO: 385) | | | | | |
| QLNDVK(ac)TTVVYPATEK | NA | NA | 0.97 | Scavenger mRNA-decapping enzyme | DCPS |
| (SEQ ID NO: 386) | | | | DcpS [128] | |
| SHSAHFFEFLTK(ac)ELALGQDR | NA | NA | −0.44 | D-dopachrome decarboxylase [87] | DDT |
| (SEQ ID NO: 387) | | | | | |
| KDFIK(ac)TTVK (SEQ ID NO: 388) | NA | NA | 0.38 | Protein DEK [367] | DEK |
| LCMLYHPDK(ac)HRDPELK | NA | NA | −0.69 | Isoform 3 of DnaJ homolog | DNAJC11 |
| (SEQ ID NO: 389) | | | | subfamily C member 11 [45] | |
| LCK(ac)YIYAK (SEQ ID NO: 390) | NA | NA | 0.45 | Eukaryotic translation initiation | EIF3C, |
| | | | | factor 3 subunit C [553] | EIF3CL |
| KPEENPASK(ac)FSSASK | NA | NA | 0.53 | Eukaryotic translation initiation | EIF4B |
| (SEQ ID NO: 391) | | | | factor 4B [586] | |
| EENTSNESTDVTK(ac)GDSK(ac)NAK | NA | NA | 0.53 | Histone acetyltransferase p300 | EP300 |
| (SEQ ID NO: 392) | | | | [1542:1546] | |
| GLAPQNK(ac)PELQK | NA | NA | 0.69 | Isoform 2 of Protein FAM107B | FAM107B |
| (SEQ ID NO: 393) | | | | [225] | |
| VYISK(ac)CYR (SEQ ID NO: 394) | NA | NA | −0.85 | Isoform 1 of Regulator of micro- | FAM82A2 |
| | | | | tubule dynamics protein 3 [426] | |
| SFYYK(ac)LR (SEQ ID NO: 395) | NA | NA | −0.74 | Fatty acid synthase [2426] | FASN |
| AVSMDNSNK(ac)YTK | NA | NA | 0.45 | Forkhead box protein O3 [259] | FOXO3 |
| (SEQ ID NO: 396) | | | | | |
| FAFK(ac)EVEVQAK | NA | NA | 0.74 | Putative rRNA methyltransferase 3 | FTSJ3 |
| (SEQ ID NO: 397) | | | | [218] | |
| LVQTAELTK(ac)VFEIR | NA | NA | −0.80 | Glia maturation factor gamma [119] | GMFG |
| (SEQ ID NO: 398) | | | | | |
| LWNTLGVCK(ac)YTVQDESHSEWVSCVR | NA | NA | 0.54 | Guanine nucleotide-binding protein | GNB2L1 |
| (SEQ ID NO: 399) | | | | subunit beta-2-like 1 [139] | |
| EFTK(ac)LEEVLTNK | NA | NA | −0.60 | Glutathione S-transferase omega-1 | GSTO1 |
| (SEQ ID NO: 400) | | | | [152] | |
| VIIVVK(ac)DGPGFYTTR | NA | 0.00 | −0.70 | Trifunctional enzyme subunit alpha | HADHA |
| (SEQ ID NO: 401) | | | | mitochondrial [540] | |
| AK(ac)FESMAEEK | NA | NA | 1.00 | Hematopoietic lineage cell- | HCLS1 |
| (SEQ ID NO: 402) | | | | specific protein [241] | |
| ATAEEMTK(ac)YHSDEYIK | NA | NA | 0.78 | Histone deacetylase 2[161] | HDAC2 |
| (SEQ ID NO: 403) | | | | | |
| ESESVDK(ac)VMDQK | NA | NA | −0.53 | Isoform 1 of Heterogeneous nuclear | HNRNPD |
| (SEQ ID NO: 404) | | | | ribonucleoprotein D0 [153] | |
| VFITDDFHDMMPK(ac)YLNFVK | NA | NA | 0.77 | Endoplasmin [428] | HSP90B1 |
| (SEQ ID NO: 405) | | | | | |
| IQEIIEQLDVTTSEYEK(ac)EKLNER | NA | NA | 0.40 | 60 kDa heat shock protein | HSPD1 |
| (SEQ ID NO: 406) | | | | mitochondrial [387] | |
| TFYQMYDK(ac)GLVYR | NA | NA | −0.56 | Isoleucyl-tRNA synthetase | IARS2 |
| (SEQ ID NO: 407) | | | | mitochondrial [233] | |
| NVTAIQGPGGK(ac)WMIPSEAK | NA | NA | −0.44 | Isoform 1 of Isocitrate dehydro- | IDH3A |
| (SEQ ID NO: 408) | | | | genase [NAD] subunit alpha | |
| | | | | mitochondrial [77] | |
| KSEDTISK(ac)MNDFMR | NA | NA | −0.57 | Isoform 1 of Gamma-interferon- | IFI16 |
| (SEQ ID NO: 409) | | | | inducible protein 16 [451] | |
| SQSCETK(ac)LLDEK | NA | NA | −0.53 | Isoform 3 of Pro-interleukin- | IL16 |
| (SEQ ID NO: 410) | | | | 16 [277] | |
| KK(ac)FLCVTK (SEQ ID NO: 411) | NA | NA | 1.00 | Kelch repeat and BTB domain- | KBTBD8 |
| | | | | containing protein 8 [178] | |
| IQFK(ac)QDDGTGPEK | NA | NA | 0.61 | Isoform 1 of Far upstream | KHSRP |
| (SEQ ID NO: 412) | | | | element-binding protein | |
| | | | | 2 [359] | |
| K(ac)GPSVQKR (SEQ ID NO: 413) | NA | NA | 0.47 | Isoform 1 of Protein lin-28 | LIN28B |
| | | | | homolog B [240] | |
| LK(ac)AEKYR (SEQ ID NO: 414) | NA | NA | −1.00 | Isoform 1 of Leucine-rich | LRRIQ3 |
| | | | | repeat and IQ domain-containing | |
| | | | | protein 3 [557] | |
| FQAK(ac)LEHEYIQNFK | NA | NA | −1.00 | Microtubule-associated protein | MAPRE1 |
| (SEQ ID NO: 415) | | | | RP/EB family member 1 [66] | |
| NVQQTVSAK(ac)GPPEK(ac)R | NA | NA | 0.49 | Mediator of RNA polymerase II | MED6 |
| (SEQ ID NO: 416) | | | | transcription subunit 6 [243:248] | |
| YK(ac)VEYPIMYSTDPENGHIFNCIQR | NA | NA | −0.59 | Microsomal glutathione S- | MGST3 |
| (SEQ ID NO: 417) | | | | transferase 3 [37] | |
| TPSVGK(ac)AMDTPKPAGGDEK | NA | NA | −0.86 | Isoform Long of Antigen | MKI67 |
| (SEQ ID NO: 418) | | | | KI-67 [2264] | |
| IIWHK(ac)FK (SEQ ID NO: 419) | NA | NA | −0.73 | Isoform 1 of 39S ribosomal | MRPL47 |
| | | | | protein L47 mitochondrial | |
| | | | | [180] | |
| FK(ac)ECLDK (SEQ ID NO: 420) | NA | NA | 0.60 | Isoform 2 of N-alpha- | NAA15 |
| | | | | acetyltransferase 15 NatA | |
| | | | | auxiliary subunit [307] | |
| (ac)AQLGK(ac)LLK | NA | NA | 0.70 | NEDD8-activating enzyme E1 | NAE1 |
| (SEQ ID NO: 421) | | | | regulatory subunit [6] | |
| SELEFK(ac)FNR (SEQ ID NO: 422) | NA | NA | 0.53 | Sialic acid synthase [61] | NANS |
| YTEQITNEK(ac)LAMVK | NA | NA | −0.40 | NADH dehydrogenase [ubiquinone] 1 | NDUFA5 |
| (SEQ ID NO: 423) | | | | alpha subcomplex subunit 5 [55] | |
| YHVSEK(ac)PYGIVEK | NA | NA | −1.00 | NADH dehydrogenase [ubiquinone] 1 | NDUFB6 |
| (SEQ ID NO: 424) | | | | beta subcomplex subunit 6 [93] | |
| CHAFEK(ac)EWIECAHGIGYTR | NA | NA | −0.63 | NADH dehydrogenase [ubiquinone] | NDUFS5 |
| (SEQ ID NO: 425) | | | | iron-sulfur protein 5 [38] | |
| DVTK(ac)AMDEK (SEQ ID NO: 426) | NA | NA | 0.53 | Isoform 2 of 6-phosphofructokinase | PFKM |
| | | | | muscle type [329] | |
| EGVHGGLINK(ac)K | NA | NA | 0.58 | Profilin-1 [126] | PFN1 |
| (SEQ ID NO: 427) | | | | | |
| TVSK(ac)VDDFLANEAK | NA | NA | 0.74 | 6-phosphogluconate dehydrogenase | PGD |
| (SEQ ID NO: 428) | | | | decarboxylating [38] | |
| ITLPVDFVTADK(ac)FDENAK | NA | NA | 0.60 | Phosphoglycerate kinase 1 [291] | PGK1 |
| (SEQ ID NO: 429) | | | | | |
| NVTGHYISPFHDIPLK(ac)VNSK | NA | NA | 0.91 | Isoform 1 of Inorganic | PPA2 |
| (SEQ ID NO: 430) | | | | pyrophosphatase 2 | |
| | | | | mitochondrial [69] | |
| FEDENFHYK(ac)HDR | NA | NA | 0.46 | Peptidyl-prolyl cis-trans | PPID |
| (SEQ ID NO: 431) | | | | isomerase D [111] | |
| HSPEDPEK(ac)YSCFALFVK | NA | NA | −0.41 | Isoform 1 of DNA-dependent protein | PRKDC |
| (SEQ ID NO: 432) | | | | kinase catalytic subunit [700] | |
| MLK(ac)QMLFR (SEQ ID NO: 433) | NA | NA | −0.47 | Proteasome subunit beta type-7 | PSMB7 |
| | | | | [127] | |
| IMK(ac)SEVLR (SEQ ID NO: 434) | NA | NA | 0.41 | 26S protease regulatory subunit | PSMC3 |
| | | | | 6A [56] | |
| TTHLIAK(ac)EEMIHNLQ | NA | NA | −0.38 | 26S proteasome non-ATPase | PSMD12 |
| (SEQ ID NO: 435) | | | | regulatory subunit 12 [448] | |
| VAHLALK(ac)HR (SEQ ID NO: 436) | NA | NA | −0.57 | Isoform Rpn10A of 26S proteasome | PSMD4 |
| | | | | non-ATPase regulatory subunit | |
| | | | | 4 [9]8 | |
| (ac)SDAAVDTSSEITTK(ac)DLK | NA | NA | 0.61 | Isoform 2 of Prothymosin alpha | PTMA, |
| (SEQ ID NO: 437) | | | | [15] | MIR1244-3, |
| | | | | | MIR1244-2, |
| | | | | | MIR1244-1 |
| HMVMQK(ac)LLR (SEQ ID NO: 438) | NA | NA | 0.71 | Isoform 1 of Poly(U)-binding- | PUF60 |
| | | | | splicing factor PUF60 [454] | |
| AFQLK(ac)SR (SEQ ID NO: 439) | NA | NA | −0.89 | ribonucleoprotein PTB-binding | RAVER1 |
| | | | | 1 [579] | |
| IMQK(ac)YGFR (SEQ ID NO: 440) | NA | NA | −0.50 | Splicing factor 45 [245] | RBM17 |
| GNLYSFGCPEYGQLGHNSDGK(ac)FIAR | NA | NA | 0.75 | Protein RCC2 [293] | RCC2 |
| (SEQ ID NO: 441) | | | | | |
| WTPEVK(ac)HFCPNVPIILVGNK | NA | NA | −0.39 | Rho-related GTP-binding protein | RHOC |
| (SEQ ID NO: 442) | | | | RhoC [104] | |
| AYHLQK(ac)STCGK | NA | 0.00 | 0.42 | 60S ribosomal protein L37 [31] | RPL37 |
| (SEQ ID NO: 443) | | | | | |
| NVYK(ac)FELDTSER | NA | 0.00 | 0.54 | Dolichyl-diphosphooligosaccharide-- | RPN2 |
| (SEQ ID NO: 444) | | | | protein glycosyltransferase | |
| | | | | subunit 2 [460] | |
| VETFSGVYK(ac)K | NA | NA | −0.78 | 40S ribosomal protein S7 [178] | RPS7 |
| (SEQ ID NO: 445) | | | | | |
| MLEK(ac)DVCEK (SEQ ID NO: 446) | NA | NA | 0.62 | Isoform 1 of Protein RUFY3 [382] | RUFY3 |
| VEWAK(ac)FQER (SEQ ID NO: 447) | NA | NA | −0.55 | Splicing factor 3A subunit | SF3A1 |
| | | | | 1 [251] | |
| LNPK(ac)TGLIDYNQLALTAR | NA | NA | −0.41 | Serine hydroxymethyltransferase | SHMT2 |
| (SEQ ID NO: 448) | | | | mitochondrial [200] | |
| GNTPK(ac)YGLIFHSTFIGR | NA | NA | −0.41 | Nucleolar protein 56 [347] | SNORD110, |
| (SEQ ID NO: 449) | | | | | SNORD86, |
| | | | | | NOP56 |
| HHAAYVNNLNVTEEK(ac)YQEALAK | NA | NA | −0.67 | Superoxide dismutase [Mn] | SOD2 |
| (SEQ ID NO: 450) | | | | mitochondrial [68] | |
| TTTCSK(ac)LAYYYQR | NA | NA | 0.40 | Signal recognition particle 54 kDa | SRP54 |
| (SEQ ID NO: 451) | | | | protein [120] | |
| DK(ac)WLCPLSGK | NA | NA | 0.42 | Isoform 2 of Serrate RNA effector | SRRT |
| (SEQ ID NO: 452) | | | | molecule homolog [712] | |
| IIEDQQESLNK(ac)WK | NA | NA | 0.57 | Lupus La protein [328] | SSB |
| (SEQ ID NO: 453) | | | | | |
| IDYGEYMDK(ac)NNVR | NA | NA | −0.52 | Single-stranded DNA-binding | SSBP1 |
| (SEQ ID NO: 454) | | | | protein mitochondrial [122] | |
| GEDFPANNIVK(ac)FLVGFTNK | NA | NA | −0.88 | Isoform 1 of Translocon-associated | SSR1 |
| (SEQ ID NO: 455) | | | | protein subunit alpha [102] | |
| DK(ac)LAQQQAAAAAAAAAAASQQGSAK | NA | NA | 0.86 | F-box-like/WD repeat-containing | TBL1XR1 |
| (SEQ ID NO: 456) | | | | protein TBL1XR1 [102] | |
| IAVEAQNK(ac)YER | NA | NA | 0.63 | Nucleoprotein TPR [1081] | TPR |
| (SEQ ID NO: 457) | | | | | |
| SQNTK(ac)ISTQLDFASK | NA | NA | −0.45 | Nucleoprotein TPR [713] | TPR |
| (SEQ ID NO: 458) | | | | | |
| GK(ac)LEEQRPER | NA | NA | −0.42 | Tumor protein translationally- | TPT1 |
| (SEQ ID NO: 459) | | | | controlled 1 [102] | |
| QPAENVNQYLTDPK(ac)FVER | NA | NA | 0.44 | cDNA FLJ40024 fis clone | UBA1 |
| (SEQ ID NO: 460) | | | | STOMA2007745 highly similar to | |
| | | | | UBIQUITIN-ACTIVATING ENZYME E1 | |
| | | | | [119] | |
| YPPPYK(ac)HFWTAES | NA | NA | −0.50 | Isoform 2 of Ubiquitin-associated | UBAP2L |
| (SEQ ID NO: 461) | | | | protein 2-like [976] | |
| IYHPNVDK(ac)LGR | NA | NA | −0.70 | Ubiquitin-conjugating enzyme E2 N | UBE2N |
| (SEQ ID NO: 462) | | | | [82] | |
| ACK(ac)LAIR (SEQ ID NO: 463) | NA | NA | −0.58 | Transitional endoplasmic reticulum | VCP |
| | | | | ATPase [696] | |
| (ac)AVPPTYADLGK(ac)SAR | NA | 0.00 | −0.78 | Voltage-dependent anion-selective | VDAC1 |
| (SEQ ID NO: 464) | | | | channel protein 1 [12] | |
| GYGFGLIK(ac)LDLK | NA | 0.00 | −0.57 | Voltage-dependent anion-selective | VDAC1 |
| (SEQ ID NO: 465) | | | | channel protein 1 [28] | |
| LTLSALLDGK(ac)NVNAGGHK | NA | 0.00 | −0.66 | Voltage-dependent anion-selective | VDAC1 |
| (SEQ ID NO: 466) | | | | channel protein 1 [266] | |
| DVFNK(ac)GYGFGMVK | NA | NA | −0.73 | Isoform 1 of Voltage-dependent | VDAC3 |
| (SEQ ID NO: 467) | | | | anion-selective channel | |
| | | | | protein 3 [20] | |
| FGIAAK(ac)YMLDCR | NA | NA | 0.43 | Isoform 1 of Voltage-dependent | VDAC3 |
| (SEQ ID NO: 468) | | | | anion-selective channel protein 3 | |
| | | | | [224] | |
| LTLSALIDGK(ac)NFSAGGHK | NA | NA | −0.71 | Isoform 1 of Voltage-dependent | VDAC3 |
| (SEQ ID NO: 469) | | | | anion-selective channel protein 3 | |
| | | | | [266] | |
| SGK(ac)FMNPTDQAR | NA | NA | −0.46 | WW domain-binding protein 11 [13] | WBP11 |
| (SEQ ID NO: 470) | | | | | |
| QLGSILK(ac)TNVR | NA | NA | 0.93 | Exportin-1 [693] | XPO1 |
| (SEQ ID NO: 471) | | | | | |
| AIVEK(ac)LR (SEQ ID NO: 472) | NA | NA | 1.00 | X-ray repair cross-complementing | XRCC6 |
| | | | | protein 6 [468] | |
| CPICEK(ac)VIQGAGK | NA | NA | −0.44 | Zinc finger and BTB domain- | ZBTB7A |
| (SEQ ID NO: 473) | | | | containing protein 7A [389] | |
| SIDFPLTK(ac)VYVVEGSK | NA | NA | 0.61 | CAAX prenyl protease 1 homolog | ZMPSTE24 |
| (SEQ ID NO: 474) | | | | [251] | |
| IIEK(ac)DVMEGVTVDDHMMK | NA | NA | 0.40 | cDNA FLJ50345 highly similar to | ZNF326 |
| (SEQ ID NO: 475) | | | | Zinc finger protein 326 [298] | |
| LVSEK(ac)LASYQAAR | −0.82 | 0.00 | −0.56 | Isoform 2 of Myc proto-oncogene | MYC |
| (SEQ ID NO: 476) | | | | protein [163] | |
| SFDK(ac)NLYR (SEQ ID NO: 477) | −0.55 | 0.00 | −0.47 | DNA replication licensing factor | MCM4 |
| | | | | MCM4 [220] | |
| LVDTGDK(ac)FR (SEQ ID NO: 478) | −0.46 | NA | −0.42 | Isoform Long of Spectrin beta | SPTBN1 |
| | | | | chain brain 1 [1913] | |
| FGIAAK(ac)YQLDPTASISAK | −0.40 | 0.00 | −0.73 | Isoform 2 of Voltage-dependent | VDAC2 |
| (SEQ ID NO: 479) | | | | anion-selective channel protein 2 | |
| | | | | [224] | |
| IK(ac)EKYIDQEELNK | 0.39 | NA | 0.45 | Isoform 2 of Heat shock protein | HSP90AA1 |
| (SEQ ID NO: 480) | | | | HSP 90-alpha [403] | |
| SYAEELAK(ac)HGMK | 0.39 | 0.00 | 0.57 | Estradiol 17-beta-dehydrogenase 12 | HSD17B12 |
| (SEQ ID NO: 481) | | | | [72] | |
| EHLLK(ac)YEYQPFAGK | 0.47 | NA | 0.45 | Isoform 1 of WD repeat-containing | WDR1 |
| (SEQ ID NO: 482) | | | | protein 1 [95] | |
| GVHPK(ac)FPEGGK | 0.48 | NA | −0.48 | NADH-cytochrome b5 reductase 1 | CYB5R1 |
| (SEQ ID NO: 483) | | | | [124] | |
| LAK(ac)LSDGVAVLK | 0.61 | 0.00 | −0.42 | 60 kDa heat shock protein | HSPD1 |
| (SEQ ID NO: 484) | | | | mitochondrial [396] | |
| LTLDK(ac)LDVK (SEQ ID NO: 485) | 0.65 | NA | −0.39 | Phosphoglycerate kinase 1 [11] | PGK1 |
| DVTLQK(ac)QCVPFR | 0.71 | NA | −0.39 | 60S ribosomal protein L17 [55] | RPL17 |
| (SEQ ID NO: 486) | | | | | |
| FVATGHGK(ac)YEK | 0.75 | NA | 1.00 | Lymphocyte-specific | LOC100133284, |
| (SEQ ID NO: 487) | | | | protein 1 [327] | LSP1 |
| VAILK(ac)ANLR (SEQ ID NO: 488) | 0.80 | 0.00 | 1.00 | Transitional endoplasmic reticulum | VCP |
| | | | | ATPase [658] | |
| IVQK(ac)HPHTGDTKEEK | 1.00 | 0.00 | 0.83 | Death-associated protein 1 [29] | DAP |
| (SEQ ID NO: 489) | | | | | |
| GSK(ac)K(ac)AVTK | 1.00 | 0.00 | 0.44 | Histone H2B type 2-E [16:17] | HIST2H2BE |
| (SEQ ID NO: 490) | | | | | |
| PKPYDPPGEK(ac)MVAAK | −1.00 | NA | NA | Cyclic AMP-dependent transcription | ATF4 |
| (SEQ ID NO: 491) | | | | factor ATF-4 [267] | |
| RPPQTIK(ac)SVR | −1.00 | NA | NA | GDP-D-glucose phosphorylase | C15orf58 |
| (SEQ ID NO: 492) | | | | C15orf58 [113] | |
| STPAITLESPDIK(ac)YPLR | −1.00 | 0.00 | NA | Isoform 1 of NADH-cytochrome b5 | CYB5R3 |
| (SEQ ID NO: 493) | | | | reductase 3 [42] | |
| HGMK(ac)VVLISR | −1.00 | NA | NA | Estradiol 17-beta-dehydrogenase | HSD17B12 |
| (SEQ ID NO: 494) | | | | 12 [76] | |
| LALQK(ac)QLTK (SEQ ID NO: 495) | −1.00 | NA | NA | Isoform 2 of Zinc finger | ZNF385C |
| | | | | protein 385C [103] | |
| NK(ac)YGDAFIR (SEQ ID NO: 496) | −0.93 | NA | NA | U6 snRNA-associated Sm-like | LSM6 |
| | | | | protein LSm6 [59] | |
| AK(ac)HDELTYF (SEQ ID NO: 497) | −0.88 | NA | 0.00 | Cystatin-B [91] | CSTB |
| NK(ac)WFFQK (SEQ ID NO: 498) | −0.86 | 0.00 | NA | 60S ribosomal protein L27 [128] | RPL27 |
| LMK(ac)YGDSLYR | −0.78 | NA | NA | Nucleolar GTP-binding protein | GTPBP4 |
| (SEQ ID NO: 499) | | | | 1 [118] | |
| LPSSTK(ac)SGWPR | −0.78 | NA | 0.00 | cDNA FLJ75110 highly similar to | PHF15 |
| (SEQ ID NO: 500) | | | | Homo sapiens PHD finger protein | |
| | | | | 15 (PHF15) mRNA [38] | |
| TLAMDVMK(ac)PR | −0.76 | NA | NA | H(+)/CI(−) exchange transporter | CLCN5 |
| (SEQ ID NO: 501) | | | | 5 [587] | |
| SAQEAYK(ac)SYIR | −0.74 | NA | NA | ATP-dependent RNA helicase DDX18 | DDX18 |
| (SEQ ID NO: 502) | | | | [584] | |
| AEK(ac)DEPGAWEETFK | −0.71 | NA | NA | Isoform 2 of Neutral alpha- | GANAB |
| (SEQ ID NO: 503) | | | | glucosidase AB [242] | |
| FSPDDK(ac)YSR (SEQ ID NO: 504) | −0.68 | NA | 0.00 | H/ACA ribonucleoprotein complex | NOP10 |
| | | | | subunit 3 [40] | |
| LAAIVAK(ac)QVLLGR | −0.67 | 0.00 | NA | 60S ribosomal protein L13a [25] | SNORD32A, |
| (SEQ ID NO: 505) | | | | | RPL13A, |
| | | | | | SNORD33, |
| | | | | | SNORD34 |
| IDK(ac)PILK (SEQ ID NO: 506) | −0.65 | NA | 0.00 | 60S ribosomal protein L8 [177] | RPL8 |
| LVPLK(ac)ETIK (SEQ ID NO: 507) | −0.64 | NA | NA | ATP synthase subunit beta | ATP5B |
| | | | | mitochondrial [485] | |
| (ac)AEPVSPLK(ac)HFVLAK | −0.63 | NA | NA | Mitochondrial transmembrane | MFN1 |
| (SEQ ID NO: 508) | | | | GTPase FZO-2 [37] | |
| EEAIK(ac)FSEEQR | −0.60 | NA | 0.00 | X-ray repair cross-complementing | XRCC5 |
| (SEQ ID NO: 509) | | | | protein 5 [648] | |
| K(ac)EELTLEGIR | −0.60 | 0.00 | NA | Eukaryotic initiation factor | EIF4A1 |
| (SEQ ID NO: 510) | | | | 4A-I [238] | |
| TLFVK(ac)GLSEDTTEETLK | −0.59 | NA | NA | cDNA FLJ45706 fis clone | NCL |
| (SEQ ID NO: 511) | | | | FEBRA2028457 highly similar to | |
| | | | | Nucleolin [470] | |
| LIAGNK(ac)PVSFLTAQQLQQLQQQGQATQVR | −0.58 | 0.00 | 0.00 | Isoform 2 of Nuclear factor | NFRKB |
| (SEQ ID NO: 512) | | | | related to kappa-B-binding | |
| | | | | protein [1262] | |
| ALK(ac)YLVMDEADR | −0.58 | NA | NA | Probable ATP-dependent RNA | DDX47 |
| (SEQ ID NO: 513) | | | | helicase DDX47 [169] | |
| LLLFK(ac)TFSR (SEQ ID NO: 514) | −0.57 | 0.00 | NA | Heterogeneous nuclear | HNRNPUL2 |
| | | | | ribonucleoprotein U-like | |
| | | | | protein 2 [553] | |
| VLGTVK(ac)WFNVR | −0.57 | NA | NA | Isoform 1 of DNA-binding | CSDA |
| (SEQ ID NO: 515) | | | | protein A [96] | |
| TLK(ac)ALEYVFK | −0.57 | 0.00 | NA | Isoform 1 of Dedicator of | DOCK2 |
| (SEQ ID NO: 516) | | | | cytokinesis protein 2 [738] | |
| LMEK(ac)EINGSK | −0.56 | NA | NA | Atlastin-3 [309] | ATL3 |
| (SEQ ID NO: 517) | | | | | |
| AVDCLLDSK(ac)WAK | −0.51 | 0.00 | NA | Translocation protein SEC62 [60] | SEC62 |
| (SEQ ID NO: 518) | | | | | |
| GHK(ac)FHHTIGGSR | −0.51 | NA | 0.00 | 60S ribosomal protein L15 [179] | RPL15 |
| (SEQ ID NO: 519) | | | | | |
| VYVLK(ac)FK (SEQ ID NO: 520) | −0.50 | NA | NA | Proteasomal ubiquitin receptor | ADRM1 |
| | | | | ADRM1 [97] | |
| LSFISVGNK(ac)FK | −0.49 | NA | NA | Isoform 2 of Myosin-VI [646] | MYO6 |
| (SEQ ID NO: 521) | | | | | |
| VITEEEK(ac)NFK | −0.46 | 0.00 | 0.00 | 60S ribosomal protein L13 [174] | RPL13 |
| (SEQ ID NO: 522) | | | | | |
| TLVLSDK(ac)HSPQK | −0.46 | 0.00 | 0.00 | Isoform 1 of Histone-lysine N- | MLL3 |
| (SEQ ID NO: 523) | | | | methyltransferase MLL3 [2809] | |
| SQFLK(ac)YIEK (SEQ ID NO: 524) | −0.46 | NA | NA | DNA replication licensing factor | MCM2 |
| | | | | MCM2 [534] | |
| SEIINSK(ac)NFDR | −0.45 | NA | 0.00 | Transmembrane protein 43 [159] | TMEM43 |
| (SEQ ID NO: 525) | | | | | |
| MQK(ac)EITALAPSTMK | −0.44 | NA | NA | Actin aortic smooth muscle [317] | ACTA2 |
| (SEQ ID NO: 526) | | | | | |
| ETGYTYILPK(ac)NVLK | −0.44 | NA | NA | Pre-mRNA-processing-splicing | PRPF8 |
| (SEQ ID NO: 527) | | | | factor 8 [2108] | |
| LLNK(ac)HGIK (SEQ ID NO: 528) | −0.43 | NA | NA | Ribosomal L1 domain-containing | RSL1D1 |
| | | | | protein 1 [120] | |
| K(ac)VLFTCFK (SEQ ID NO: 529) | −0.42 | NA | NA | Isoform Beta-2 of DNA | TOP2B |
| | | | | topoisomerase 2-beta [749] | |
| DMCLEK(ac)DTLGLFLR | −0.41 | NA | NA | Isoform 1 of U5 small nuclear | SNRNP200 |
| (SEQ ID NO: 530) | | | | ribonucleoprotein 200 kDa | |
| | | | | helicase [745] | |
| IAAYK(ac)SILQER | −0.41 | NA | 0.00 | X-ray repair cross-complementing | XRCC5 |
| (SEQ ID NO: 531) | | | | protein 5 [265] | |
| YAVLYQPLFDK(ac)R | −0.41 | NA | 0.00 | Nucleosome assembly protein 1- | NAP1L1 |
| (SEQ ID NO: 532) | | | | like 1 [116] | |
| SHLAK(ac)EGLYQYK | −0.41 | 0.00 | 0.00 | Eukaryotic translation initiation | EIF3A |
| (SEQ ID NO: 533) | | | | factor 3 subunit A [68] | |
| YKDAIHFYNK(ac)SLAEHR | −0.40 | NA | 0.00 | Stress-induced-phosphoprotein | STIP1 |
| (SEQ ID NO: 534) | | | | 1 [325] | |
| YIGK(ac)TMDYR (SEQ ID NO: 535) | −0.39 | NA | NA | 39S ribosomal protein L24 | MRPL24 |
| | | | | mitochondrial [100] | |
| GLCEK(ac)PLASAAAK | −0.39 | NA | 0.00 | Isoform 2 of Transportin-3 [513] | TNPO3 |
| (SEQ ID NO: 536) | | | | | |
| GK(ac)FGNVYLAR | −0.39 | NA | NA | Isoform 1 of Aurora kinase C | AURKC |
| (SEQ ID NO: 537) | | | | [53] | |
| LWSK(ac)AIFAGYK | 0.38 | 0.00 | 0.00 | 60S ribosomal protein L35a [8] | RPL35A |
| (SEQ ID NO: 538) | | | | | |
| LQVLDPVPK(ac)PVIK | 0.39 | NA | NA | CD48 antigen [133] | CD48 |
| (SEQ ID NO: 539) | | | | | |
| ELK(ac)EIQYGIR | 0.39 | 0.00 | 0.00 | Branched-chain-amino-acid | BCAT2 |
| (SEQ ID NO: 540) | | | | aminotransferase [337] | |
| GYPTIK(ac)FFR (SEQ ID NO: 541) | 0.39 | 0.00 | 0.00 | Protein disulfide-isomerase [103] | P4HB |
| IHGVGFK(ac)K (SEQ ID NO: 542) | 0.39 | NA | 0.00 | 60S ribosomal protein L31 [39] | RPL31 |
| ISGASEK(ac)DIVHSGLAYTMER | 0.39 | 0.00 | 0.00 | Glutamate dehydrogenase 1 | GLUD1 |
| (SEQ ID NO: 543) | | | | mitochondrial [503] | |
| PK(ac)PLLFK (SEQ ID NO: 544) | 0.39 | NA | NA | Isoform 1 of UDP- | UGGT1 |
| | | | | glucose:glycoprotein | |
| | | | | glucosyltransferase 1 [176] | |
| FNNFLK(ac)ALQEK | 0.39 | NA | NA | X-ray repair cross-complementing | XRCC5 |
| (SEQ ID NO: 545) | | | | protein 5 [660] | |
| AVDLIQK(ac)HK (SEQ ID NO: 546) | 0.39 | 0.00 | 0.00 | Flap endonuclease 1 [252] | FEN1 |
| AEEILEK(ac)GLK | 0.39 | 0.00 | NA | Isoform 1 of 60S ribosomal | RPL11 |
| (SEQ ID NO: 547) | | | | protein L11 [85] | |
| LFDYFPK(ac)PYPNSEAAR | 0.39 | NA | NA | Cytochrome c1 heme protein | CYC1 |
| (SEQ ID NO: 548) | | | | mitochondrial [177] | |
| AHLQK(ac)LMSDK | 0.39 | NA | 0.00 | Glycyl-tRNA synthetase [224] | GARS |
| (SEQ ID NO: 549) | | | | | |
| TFK(ac)GVVDVVMK | 0.39 | 0.00 | 0.00 | Elongation factor G 2 | GFM2 |
| (SEQ ID NO: 550) | | | | mitochondrial precursor [265] | |
| AAWEHMK(ac)K (SEQ ID NO: 551) | 0.39 | NA | NA | Peroxisomal multifunctional | HSD17B4 |
| | | | | enzyme type 2 [139] | |
| STVAQLVK(ac)R (SEQ ID NO: 552) | 0.39 | 0.00 | NA | ATP synthase subunit alpha | ATP5A1 |
| | | | | mitochondrial [261] | |
| YNIEK(ac)DIAAHIK | 0.40 | 0.00 | 0.00 | Dynein light chain 1 cytoplasmic | DYNLL1 |
| (SEQ ID NO: 553) | | | | [36] | |
| HFAFK(ac)MASGAANVVGPK | 0.40 | NA | 0.00 | Protein FAM3C [72] | FAM3C |
| (SEQ ID NO: 554) | | | | | |
| TDFDKNK(ac)IWYEHR | 0.40 | NA | 0.00 | Isocitrate dehydrogenase [NADP] | IDH2 |
| (SEQ ID NO: 555) | | | | mitochondrial [282] | |
| HGYIK(ac)GIVK (SEQ ID NO: 556) | 0.40 | NA | NA | 60S ribosomal protein L8 [42] | RPL8 |
| FAK(ac)PVYPGQTLQTEMWK | 0.40 | NA | NA | Peroxisomal multifunctional enzyme | HSD17B4 |
| (SEQ ID NO: 557) | | | | type 2 [565] | |
| NCSSFLIK(ac)R (SEQ ID NO: 558) | 0.40 | 0.00 | 0.00 | 60S ribosomal protein L28 [19] | RPL28 |
| NK(ac)IAGYVTHLMK | 0.40 | 0.00 | 0.00 | 40S ribosomal protein S17 [49] | RPS17, |
| (SEQ ID NO: 559) | | | | | RPS17L |
| AVTK(ac)AQK(ac)K | 0.40 | 0.00 | NA | Histone H2B type 2-E [21:24] | HIST2H2BE |
| (SEQ ID NO: 560) | | | | | |
| VK(ac)ILFNK (SEQ ID NO: 561) | 0.40 | NA | NA | Isoform 1 of Polypyrimidine tract- | PTBP1 |
| | | | | binding protein 1 [368] | |
| VK(ac)FIHDQTSPNPK | 0.40 | 0.00 | 0.00 | Tricarboxylate transport protein | SLC25A1 |
| (SEQ ID NO: 562) | | | | mitochondrial [149] | |
| YFDEK(ac)IAK (SEQ ID NO: 563) | 0.41 | 0.00 | 0.00 | D-beta-hydroxybutyrate | BDH1 |
| | | | | dehydrogenase mitochondrial [280] | |
| LSLLSK(ac)FR (SEQ ID NO: 564) | 0.41 | 0.00 | 0.00 | Mitochondrial trifunctional | HADHB |
| | | | | protein beta subunit | |
| | | | | (Fragment) [100] | |
| VK(ac)NELFK (SEQ ID NO: 565) | 0.41 | 0.00 | NA | Isoform 1 of Hydroxyacyl-coenzyme | HADH |
| | | | | A dehydrogenase mitochondrial | |
| | | | | [127] | |
| EVGKDVSDEK(ac)LR | 0.41 | NA | NA | Citrate synthase mitochondrial | CS |
| (SEQ ID NO: 566) | | | | [327] | |
| SFLLK(ac)DSETSQR | 0.41 | 0.00 | 0.00 | Serine hydroxymethyltransferase | SHMT2 |
| (SEQ ID NO: 567) | | | | mitochondrial [474] | |
| VFEK(ac)YGR (SEQ ID NO: 568) | 0.41 | NA | NA | Serine/arginine-rich splicing | SRSF2 |
| | | | | factor 2 [36] | |
| NSNPALNDNLEK(ac)GLLK | 0.41 | NA | 0.00 | Chloride intracellular channel | CLIC1 |
| (SEQ ID NO: 569) | | | | protein 1 [131] | |
| LAAFGQLHK(ac)VLGMDPLPSK | 0.41 | NA | NA | Isoform 5 of Interleukin enhancer- | ILF3 |
| (SEQ ID NO: 570) | | | | binding factor 3 [332] | |
| DVSYQGGK(ac)SIK | 0.42 | NA | 0.00 | Isoform 1 of Histone-lysine N- | MLL3 |
| (SEQ ID NO: 571) | | | | methyltransferase MLL3 [758] | |
| SIDLK(ac)DK (SEQ ID NO: 572) | 0.42 | NA | NA | 60 kDa heat shock protein | HSPD1 |
| | | | | mitochondrial [87] | |
| MTDK(ac)CFR (SEQ ID NO: 573) | 0.42 | NA | 0.00 | Mitochondrial import inner | TIMM13 |
| | | | | membrane translocase subunit Tim13 | |
| | | | | [45] | |
| HAHGDQYK(ac)ATDFVADR | 0.42 | 0.00 | 0.00 | Isocitrate dehydrogenase [NADP] | IDH2 |
| (SEQ ID NO: 574) | | | | mitochondrial [180] | |
| (ac)ACGLVASNLNLK(ac)PGECLR | 0.42 | 0.00 | 0.00 | Galectin-1 [13] | LGALS1 |
| (SEQ ID NO: 575) | | | | | |
| HVVFGK(ac)VK (SEQ ID NO: 576) | 0.42 | NA | 0.00 | Peptidylprolyl isomerase A | PPIAP26 |
| | | | | (Cyclophilin A) (PPIA) pseudogene | |
| | | | | [141] | |
| AVLIDK(ac)DQSPK | 0.43 | NA | 0.00 | Isoform 1 of 3-hydroxyisobutyryl- | HIBCH |
| (SEQ ID NO: 577) | | | | CoA hydrolase mitochondrial [353] | |
| YDDPEVQK(ac)DIK | 0.43 | 0.00 | 0.00 | Stress-70 protein mitochondrial | HSPA9 |
| (SEQ ID NO: 578) | | | | [135] | |
| DDNGK(ac)PYVLPSVR | 0.43 | 0.00 | 0.00 | Aspartate aminotransferase | GOT2 |
| (SEQ ID NO: 579) | | | | mitochondrial [73] | |
| AGEATVK(ac)FLK | 0.43 | NA | NA | 39S ribosomal protein L9 | MRPL9 |
| (SEQ ID NO: 580) | | | | mitochondrial [165] | |
| RNPDTQWITK(ac)PVHK | 0.43 | 0.00 | NA | 60S ribosomal protein L15 [153] | RPL15 |
| (SEQ ID NO: 581) | | | | | |
| LQDFK(ac)SFLLK | 0.43 | 0.00 | 0.00 | Serine hydroxymethyltransferase | SHMT2 |
| (SEQ ID NO: 582) | | | | mitochondrial [469] | |
| EFALK(ac)HLPNDPMFK | 0.43 | 0.00 | NA | Citrate synthase mitochondrial | CS |
| (SEQ ID NO: 583) | | | | [366] | |
| TACAINK(ac)VLMGR | 0.43 | NA | 0.00 | Isoform 1 of Protein FAM98A [297] | FAM98A |
| (SEQ ID NO: 584) | | | | | |
| LMK(ac)YLLEQLK | 0.43 | 0.00 | NA | Isoform 1 of Protein MB21D1 [414] | MB21D1 |
| (SEQ ID NO: 585) | | | | | |
| ASEIGEK(ac)YR (SEQ ID NO: 586) | 0.44 | 0.00 | 0.00 | Conserved hypothetical protein | KIAA0947 |
| | | | | [484] | |
| ITK(ac)SDGIR (SEQ ID NO: 587) | 0.44 | 0.00 | 0.00 | ADP/ATP translocase 3 [166] | SLC25A6 |
| ELEAENYHDIK(ac)R | 0.44 | NA | NA | Isoform Long of Spectrin beta | SPTBN1 |
| (SEQ ID NO: 588) | | | | chain brain 1 [497] | |
| NLHSK(ac)WLK (SEQ ID NO: 589) | 0.44 | NA | NA | Isoform Long of Spectrin beta | SPTBN1 |
| | | | | chain brain 1 [1312] | |
| LTSLNVK(ac)YNNDK | 0.44 | 0.00 | 0.00 | regulator of differentiation 1 | ROD1 |
| (SEQ ID NO: 590) | | | | isoform 2 [236] | |
| VASK(ac)QLEEEDGSR | 0.44 | NA | NA | Coatomer subunit gamma [238] | COPG |
| (SEQ ID NO: 591) | | | | | |
| TAWLDGK(ac)HVVFGK | 0.44 | 0.00 | 0.00 | Peptidyl-prolyl cis-trans | PPIB |
| (SEQ ID NO: 592) | | | | isomerase B [165] | |
| VWNYK(ac)LR (SEQ ID NO: 593) | 0.45 | NA | 0.00 | Isoform 1 of Coatomer subunit | COPA |
| | | | | alpha [81] | |
| K(ac)NINCSIEESFQR | 0.45 | 0.00 | 0.00 | Hydroxymethylglutaryl-CoA lyase | HMGCL |
| (SEQ ID NO: 594) | | | | mitochondrial [137] | |
| YEK(ac)DIAAYR (SEQ ID NO: 595) | 0.45 | NA | 0.00 | High mobility group protein B2 | HMGB2 |
| | | | | [157] | |
| FYK(ac)DVLEVGELAK | 0.45 | 0.00 | 0.00 | Isoform 1 of N-alpha- | NAA50 |
| (SEQ ID NO: 596) | | | | acetyltransferase 50 NatE | |
| | | | | catalytic subunit [37] | |
| VVK(ac)QASEGPLK | 0.45 | 0.00 | 0.00 | Glyceraldehyde-3-phosphate | GAPDH |
| (SEQ ID NO: 597) | | | | dehydrogenase [263] | |
| TSSAFVGK(ac)TPEASPEPK | 0.46 | NA | NA | Isoform 1 of 26S proteasome non- | PSMD1 |
| (SEQ ID NO: 598) | | | | ATPase regulatory subunit 1 [310] | |
| ADGIVSK(ac)NF (SEQ ID NO: 599) | 0.46 | NA | NA | 40S ribosomal protein S21 [81] | RPS21 |
| ISEQSDAK(ac)LK | 0.46 | 0.00 | 0.00 | ATP synthase subunit alpha | ATP5A1 |
| (SEQ ID NO: 600) | | | | mitochondrial [539] | |
| K(ac)SSETLR (SEQ ID NO: 601) | 0.46 | 0.00 | NA | Isoform CNPI of 23-cyclic- | CNP |
| | | | | nucleotide 3- | |
| | | | | phosphodiesterase [177] | |
| SGLLDK(ac)WK (SEQ ID NO: 602) | 0.46 | 0.00 | 0.00 | Signal peptidase complex subunit | LOC653566, |
| | | | | 2 [38] | SPCS2 |
| LNLDK(ac)MMEQK | 0.46 | 0.00 | NA | Dihydrolipoyl dehydrogenase | DLD |
| (SEQ ID NO: 603) | | | | mitochondrial [122] | |
| LAK(ac)YFFNK (SEQ ID NO: 604) | 0.46 | NA | 0.00 | Periodic tryptophan protein 2 | PWP2 |
| | | | | homolog [279] | |
| NSFDCFK(ac)K (SEQ ID NO: 605) | 0.46 | NA | 0.00 | Calcium-binding mitochondrial | SLC25A13 |
| | | | | carrier protein Aralar2 [379] | |
| AGTFK(ac)MVFTPK | 0.46 | 0.00 | 0.00 | Isocitrate dehydrogenase [NADP] | IDH2 |
| (SEQ ID NO: 606) | | | | mitochondrial [193] | |
| SLNLK(ac)HIK (SEQ ID NO: 607) | 0.46 | 0.00 | 0.00 | HLA-B associated transcript | SNORD84, |
| | | | | 1 [188] | DDX39B |
| DHCVAHK(ac)LFNNLK | 0.46 | 0.00 | 0.00 | Cytochrome b-c1 complex subunit 6 | UQCRH |
| (SEQ ID NO: 608) | | | | mitochondrial [85] | |
| NVK(ac)FVLK (SEQ ID NO: 609) | 0.47 | NA | NA | Translocon-associated protein | SSR3 |
| | | | | subunit gamma [81] | |
| VLTVINQTQK(ac)ENLR | 0.47 | NA | NA | 60S ribosomal protein L35 [66] | RPL35 |
| (SEQ ID NO: 610) | | | | | |
| GAK(ac)PVVVLQK | 0.47 | NA | 0.00 | Isoform 2 of Nipped-B-like protein | NIPBL |
| (SEQ ID NO: 611) | | | | [1000] | |
| ELEK(ac)VCNPIITK | 0.47 | 0.00 | 0.00 | Isoform 1 of Heat shock cognate | HSPA8 |
| (SEQ ID NO: 612) | | | | 71 kDa protein [601] | |
| IHDVLCK(ac)LVEK | 0.47 | NA | NA | Leucine-rich PPR motif-containing | LRPPRC |
| (SEQ ID NO: 613) | | | | protein mitochondrial [864] | |
| K(ac)FAYLGR (SEQ ID NO: 614) | 0.47 | 0.00 | 0.00 | 60S ribosomal protein L13a [134] | SNORD32A, |
| | | | | | RPL13A, |
| | | | | | SNORD33, |
| | | | | | SNORD34 |
| SK(ac)GK(ac)NSDEEAPK | 0.47 | NA | NA | Isoform 2 of Inhibitor of growth | ING4 |
| (SEQ ID NO: 615) | | | | protein 4 [145:147] | |
| K(ac)EYVFADSK (SEQ ID NO: 616) | 0.47 | NA | NA | Isoform 1 of Phosphati- | INPP5D, |
| | | | | dylinositol-345-trisphosphate | LOC646743 |
| | | | | 5-phosphatase 1 [371] | |
| EIAENALGK(ac)HK | 0.47 | NA | NA | Isoform 1 of Heterogeneous nuclear | HNRNPH3 |
| (SEQ ID NO: 617) | | | | ribonucleoprotein H3 [76] | |
| FQK(ac)ELER (SEQ ID NO: 618) | 0.48 | NA | NA | 39S ribosomal protein L44 | MRPL44 |
| | | | | mitochondrial [43] | |
| GFSLLATEDK(ac)EALKK | 0.48 | NA | NA | Poly [ADP-ribose] polymerase | PARP1 |
| (SEQ ID NO: 619) | | | | 1 [192] | |
| VIISAPSADAPMFVMGVNHEK(ac)YDNSLK | 0.48 | NA | 0.00 | Glyceraldehyde-3-phosphate | GAPDH |
| (SEQ ID NO: 620) | | | | dehydrogenase [139] | |
| GAGTDEK(ac)TLTR | 0.48 | 0.00 | 0.00 | Annexin A6 [620] | ANXA6 |
| (SEQ ID NO: 621) | | | | | |
| GPLDK(ac)WR (SEQ ID NO: 622) | 0.48 | 0.00 | 0.00 | 60S ribosomal protein L10- | RPL10L |
| | | | | like [208] | |
| EFHQAGK(ac)PIGLCCIAPVLAAK | 0.48 | NA | NA | Isoform Long of ES1 protein | C21orf33 |
| (SEQ ID NO: 623) | | | | homolog mitochondrial [171] | |
| TTLLYK(ac)LK (SEQ ID NO: 624) | 0.49 | 0.00 | 0.00 | ADP-ribosylation factor-like | ARL11 |
| | | | | protein 11 [31] | |
| VPNDK(ac)YYGAQTVR | 0.49 | 0.00 | 0.00 | Isoform Mitochondrial of Fumarate | FH |
| (SEQ ID NO: 625) | | | | hydratase mitochondrial [66] | |
| ADTLTPEECQQFK(ac)K | 0.49 | NA | 0.00 | Isoform 2 of Septin-7 [207] | 7-Sep |
| (SEQ ID NO: 626) | | | | | |
| AFAK(ac)ELFLGK | 0.49 | 0.00 | 0.00 | Acyl-CoA dehydrogenase family | ACAD9 |
| (SEQ ID NO: 627) | | | | member 9 mitochondrial [41] | |
| SYVSEK(ac)DVTSAK | 0.49 | 0.00 | 0.00 | Leucine-rich PPR motif-containing | LRPPRC |
| (SEQ ID NO: 628) | | | | protein mitochondrial [1332] | |
| LIGK(ac)QGR (SEQ ID NO: 629) | 0.49 | NA | NA | cDNA FLJ56047 highly similar to | AKAP1 |
| | | | | A kinase anchor protein 1 | |
| | | | | mitochondrial [667] | |
| EHTALLK(ac)IEGVYAR | 0.49 | 0.00 | 0.00 | 60S ribosomal protein L35a [29] | RPL35A |
| (SEQ ID NO: 630) | | | | | |
| FNDGSDEK(ac)KK | 0.49 | NA | NA | ATP synthase subunit alpha | ATP5A1 |
| (SEQ ID NO: 631) | | | | mitochondrial [239] | |
| FSK(ac)SQLDIIIHSLK | 0.50 | NA | NA | X-ray repair cross-complementing | XRCC5 |
| (SEQ ID NO: 632) | | | | protein 5 [144] | |
| LTCEEEEEK(ac)IFGR | 0.51 | NA | NA | Isoform Short of Probable global | SMARCA2 |
| (SEQ ID NO: 633) | | | | transcription activator SNF2L2 | |
| | | | | [1302] | |
| NDEELNK(ac)LLGR | 0.52 | 0.00 | 0.00 | Histone H2A type 1-B/E [96] | HIST1H2AE, |
| (SEQ ID NO: 634) | | | | | HIST1H2AB, |
| | | | | | HIST1H2AD, |
| | | | | | HIST1H2AG, |
| | | | | | HIST1H2AK, |
| | | | | | HIST1H2AL, |
| | | | | | HIST1H2AM, |
| | | | | | HIST1H2AJ, |
| | | | | | HIST1H2AI |
| ALEAVFGK(ac)YGR | 0.52 | NA | NA | Heterogeneous nuclear | RBMX |
| (SEQ ID NO: 635) | | | | ribonucleoprotein G [30] | |
| TFK(ac)TVFAEHISDECK | 0.52 | 0.00 | 0.00 | 60S ribosomal protein L3 [103] | SNORD43, |
| (SEQ ID NO: 636) | | | | | RPL3 |
| YK(ac)PESEELTAER | 0.52 | 0.00 | 0.00 | Protein disulfide-isomerase [328] | P4HB |
| (SEQ ID NO: 637) | | | | | |
| NAEK(ac)YAEEDRR | 0.52 | 0.00 | 0.00 | Stress-70 protein mitochondrial | HSPA9 |
| (SEQ ID NO: 638) | | | | [567] | |
| SKSDPIMLLK(ac)DR | 0.53 | 0.00 | 0.00 | pyruvate dehydrogenase E1 | PDHA1 |
| (SEQ ID NO: 639) | | | | component subunit alpha somatic | |
| | | | | form mitochondrial isoform 2 | |
| | | | | precursor [359] | |
| GVDPK(ac)FLR (SEQ ID NO: 640) | 0.53 | NA | NA | Ribosomal protein L29 [38] | RPL29, |
| | | | | | RPL29P4 |
| LIK(ac)DGLIIR (SEQ ID NO: 641) | 0.53 | NA | NA | 60S ribosomal protein L19 [46] | RPL19 |
| HLLPK(ac)IR (SEQ ID NO: 642) | 0.53 | NA | NA | 6-phosphogluconate dehydrogenase | PGD |
| | | | | decarboxylating [253] | |
| LGK(ac)PSLVR (SEQ ID NO: 643) | 0.53 | NA | NA | TOB3 [280] | ATAD3B |
| EQIYK(ac)LAK (SEQ ID NO: 644) | 0.54 | 0.00 | NA | 40S ribosomal protein S13 [39] | RPS13 |
| VEYFLK(ac)WK (SEQ ID NO: 645) | 0.54 | 0.00 | 0.00 | Chromobox protein homolog 3 [50] | CBX3 |
| HYK(ac)TDFDK (SEQ ID NO: 646) | 0.54 | 0.00 | 0.00 | Isocitrate dehydrogenase [NADP] | IDH2 |
| | | | | mitochondrial [275] | |
| EGYAWAEDK(ac)EHCEEYGR | 0.54 | NA | 0.00 | tRNA-splicing ligase RtcB homolog | C22orf28 |
| (SEQ ID NO: 647) | | | | [190] | |
| LAYIAHPK(ac)LGK | 0.55 | NA | NA | Ribosomal protein L29 [103] | RPL29, |
| (SEQ ID NO: 648) | | | | | RPL29P4 |
| IFSQETLTK(ac)AQILK | 0.55 | 0.00 | NA | Prenylcysteine oxidase 1 [415] | PCYOX1 |
| (SEQ ID NO: 649) | | | | | |
| ALTGGIAHLFK(ac)QNK | 0.55 | 0.00 | 0.00 | Dihydrolipoyl dehydrogenase | DLD |
| (SEQ ID NO: 650) | | | | mitochondrial [143] | |
| FYVK(ac)DHR (SEQ ID NO: 651) | 0.55 | NA | 0.00 | CDGSH iron-sulfur domain- | CISD1 |
| | | | | containing protein 1 [37] | |
| SPVNTK(ac)SLFK | 0.55 | NA | NA | Isoform 1 of DNA-dependent protein | PRKDC |
| (SEQ ID NO: 652) | | | | kinase catalytic subunit [1057] | |
| HIVK(ac)EFK (SEQ ID NO: 653) | 0.56 | 0.00 | 0.00 | Stress-70 protein mitochondrial | HSPA9 |
| | | | | [288] | |
| MYKEEGLK(ac)AFYK | 0.56 | 0.00 | 0.00 | Isoform A of Phosphate carrier | SLC25A3 |
| (SEQ ID NO: 654) | | | | protein mitochondrial [214] | |
| LDAQVK(ac)ELVLK | 0.56 | 0.00 | NA | Dolichyl-diphospho- | RPN1 |
| (SEQ ID NO: 655) | | | | oligosaccharide-- | |
| | | | | protein glycosyltransferase | |
| | | | | subunit 1 precursor [598] | |
| GYPTLK(ac)LFKPGQEAVK | 0.56 | NA | NA | Thioredoxin domain-containing | TXNDC5, |
| (SEQ ID NO: 656) | | | | protein 5 [140] | MUTED, |
| | | | | | MUTED- |
| | | | | | TXNDC5 |
| EVCFACVDGK(ac)EFR | 0.57 | NA | 0.00 | Isoform 1 of Clathrin heavy | CLTC |
| (SEQ ID NO: 657) | | | | chain 1 [1264] | |
| YK(ac)EALEQCR (SEQ ID NO: 658) | 0.57 | 0.00 | NA | Isoform 2 of Antigen peptide | TAP2 |
| | | | | transporter 2 [356] | |
| YELTGK(ac)FER (SEQ ID NO: 659) | 0.57 | 0.00 | 0.00 | Annexin A6 [81] | ANXA6 |
| FIK(ac)IDGK (SEQ ID NO: 660) | 0.57 | NA | NA | 40S ribosomal protein S4 X | RPS4X |
| | | | | isoform [71] | |
| LAMVK(ac)AEPDVK | 0.58 | NA | 0.00 | NADH dehydrogenase [ubiquinone] | NDUFA5 |
| (SEQ ID NO: 661) | | | | 1 alpha subcomplex subunit | |
| | | | | 5 [60] | |
| NEK(ac)LFYR (SEQ ID NO: 662) | 0.58 | NA | 0.00 | NADP-dependent malic enzyme | ME3 |
| | | | | mitochondrial [119] | |
| K(ac)FVCPECSK (SEQ ID NO: 663) | 0.58 | NA | NA | Isoform 1 of Transcription factor | SP3 |
| | | | | Sp3 [680] | |
| DLSLDDFK(ac)GK | 0.58 | 0.00 | 0.00 | Thioredoxin-dependent peroxide | PRDX3 |
| (SEQ ID NO: 664) | | | | reductase mitochondrial [91] | |
| DLTDYLMK(ac)ILTER | 0.58 | NA | NA | Beta-actin-like protein 2 [192] | ACTBL2 |
| (SEQ ID NO: 665) | | | | | |
| HGASPELQK(ac)QIR | 0.58 | NA | NA | Peroxisomal membrane protein 11B | PEX11B |
| (SEQ ID NO: 666) | | | | [43] | |
| LNQLK(ac)PGLQYK | 0.59 | NA | NA | Isoform 5 of Interleukin enhancer- | ILF3 |
| (SEQ ID NO: 667) | | | | binding factor 3 [413] | |
| ISK(ac)LYGDLK (SEQ ID NO: 668) | 0.59 | 0.00 | NA | cDNA FLJ61478 highly similar to | SDHA |
| | | | | Succinate dehydrogenase | |
| | | | | (ubiquinone) flavoprotein subunit | |
| | | | | mitochondrial [541] | |
| LTSDDVK(ac)EQIYK | 0.60 | 0.00 | 0.00 | 40S ribosomal protein S13 [34] | RPS13 |
| (SEQ ID NO: 669) | | | | | |
| SCNCLLLK(ac)VNQIGSVTESLQACK | 0.60 | NA | 0.00 | Isoform alpha-enolase of Alpha- | ENO1 |
| (SEQ ID NO: 670) | | | | enolase [343] | |
| VTCIDPNPNFEK(ac)FLIK | 0.60 | 0.00 | 0.00 | Methyltransferase-like protein 7A | METTL7A |
| (SEQ ID NO: 671) | | | | [105] | |
| LILGLMMPPAHYDAK(ac)QLK | 0.60 | 0.00 | 0.00 | Annexin A6 [442] | ANXA6 |
| (SEQ ID NO: 672) | | | | | |
| EVK(ac)LLLLGAGESGK | 0.60 | 0.00 | NA | Guanine nucleotide-binding | GNAI3 |
| (SEQ ID NO: 673) | | | | protein G(k) subunit alpha [35] | |
| EAKPDELMDSK(ac)LR | 0.60 | 0.00 | NA | Isoform 1 of Vesicle-associated | VAPA |
| (SEQ ID NO: 674) | | | | membrane protein-associated | |
| | | | | protein A [125] | |
| YNWSAK(ac)AK (SEQ ID NO: 675) | 0.60 | NA | NA | 60S ribosomal protein L37 [52] | RPL37 |
| GNK(ac)PWISLPR | 0.60 | NA | NA | 40S ribosomal protein S4 X | RPS4X |
| (SEQ ID NO: 676) | | | | isoform [233] | |
| EVVEAHVDQK(ac)NK | 0.61 | NA | NA | Isoform Long of ES1 protein | C21orf33 |
| (SEQ ID NO: 677) | | | | homolog mitochondrial [233] | |
| LENDK(ac)SFR (SEQ ID NO: 678) | 0.61 | 0.00 | 0.00 | Isoform 1 of Enoyl-CoA delta | ECI1 |
| | | | | isomerase 1 mitochondrial [89] | |
| LVAMK(ac)FLR (SEQ ID NO: 679) | 0.61 | 0.00 | 0.00 | Isoform 1 of Nucleoside | NME1, NME2, |
| | | | | diphosphate kinase B [39] | NME1-NME2 |
| KVPFGK(ac)TYCCDLK | 0.62 | NA | NA | Mitochondrial carrier homolog | MTCH2 |
| (SEQ ID NO: 680) | | | | 2 [293] | |
| TK(ac)FVDGVSTVAR | 0.62 | NA | NA | Isoform 1 of Structural | SMC2 |
| (SEQ ID NO: 681) | | | | maintenance of chromosomes | |
| | | | | protein 2 [1160] | |
| LAQLEEAK(ac)QASIQHIQNAIDTEK | 0.63 | NA | NA | ATP synthase subunit b | ATP5F1 |
| (SEQ ID NO: 682) | | | | mitochondrial [139] | |
| IPVPVQK(ac)NIDQQIK | 0.64 | NA | NA | Isoform 1 of Pre-mRNA-splicing | PRPF38B |
| (SEQ ID NO: 683) | | | | factor 38B [227] | |
| YQLDKDGVVLFK(ac)K | 0.64 | NA | NA | Protein disulfide-isomerase [207] | P4HB |
| (SEQ ID NO: 684) | | | | | |
| VDIRPQLLK(ac)NALQR | 0.64 | NA | NA | Isoform 1 of Heterochromatin | HP1BP3 |
| (SEQ ID NO: 685) | | | | protein 1-binding protein 3 [302] | |
| NQK(ac)LTATTQK | 0.64 | NA | NA | Nucleoprotein TPR [748] | TPR |
| (SEQ ID NO: 686) | | | | | |
| YYK(ac)NIGLGFK | 0.65 | NA | NA | 40S ribosomal protein S11 [38] | RPS11 |
| (SEQ ID NO: 687) | | | | | |
| SGK(ac)YDLDFK (SEQ ID NO: 688) | 0.65 | 0.00 | 0.00 | Isoform alpha-enolase of Alpha- | ENO1 |
| | | | | enolase [256] | |
| LYGDLK(ac)HLK (SEQ ID NO: 689) | 0.65 | 0.00 | 0.00 | cDNA FLJ61478 highly similar to | SDHA |
| | | | | Succinate dehydrogenase | |
| | | | | (ubiquinone) flavoprotein subunit | |
| | | | | mitochondrial [547] | |
| VENEAEK(ac)DLQCHAPVR | 0.65 | NA | NA | Isoform 1 of Bromodomain- | BRD7 |
| (SEQ ID NO: 690) | | | | containing protein 7 [103] | |
| DSLYK(ac)DAMQYASESK | 0.65 | NA | NA | Isoform 1 of Clathrin heavy | CLTC |
| (SEQ ID NO: 691) | | | | chain 1 [1535] | |
| TISAK(ac)YAEER | 0.65 | NA | 0.00 | Isoform 1 of Myosin-9 [1459] | MYH9 |
| (SEQ ID NO: 692) | | | | | |
| (ac)ASNK(ac)TTLQK | 0.66 | 0.00 | 0.00 | Chromobox protein homolog 3 [5] | CBX3 |
| (SEQ ID NO: 693) | | | | | |
| GYLADPAK(ac)FPEAR | 0.66 | NA | NA | 39S ribosomal protein L15 | MRPL15 |
| (SEQ ID NO: 694) | | | | mitochondrial [228] | |
| SCEIK(ac)FLTFK | 0.66 | 0.00 | NA | Isoform 2 of 39S ribosomal | MRPL39 |
| (SEQ ID NO: 695) | | | | protein L39 mitochondrial | |
| | | | | [126] | |
| SELK(ac)HAK (SEQ ID NO: 696) | 0.66 | NA | NA | Isoform Long of Delta-1-pyrroline- | ALDH18A1 |
| | | | | 5-carboxylate synthase [68] | |
| SCGLNPK(ac)LEK | 0.66 | NA | NA | Isoform 5 of Transcriptional | ATRX |
| (SEQ ID NO: 697) | | | | regulator ATRX [468] | |
| EVK(ac)VLLDQLR | 0.67 | NA | NA | Isoform 1 of Adipocyte plasma | C20orf3 |
| (SEQ ID NO: 698) | | | | membrane-associated protein [250] | |
| KAVTK(ac)VQK (SEQ ID NO: 699) | 0.67 | 0.00 | 0.00 | Histone H2B type 2-F [21] | HIST2H2BF |
| ILQK(ac)QGFK (SEQ ID NO: 700) | 0.67 | 0.00 | 0.00 | Dihydrolipoyl dehydrogenase | DLD |
| | | | | mitochondrial [267] | |
| NK(ac)FGAPQK (SEQ ID NO: 701) | 0.68 | NA | 0.00 | Trifunctional enzyme subunit alpha | HADHA |
| | | | | mitochondrial [353] | |
| VTAVHK(ac)ANIMK | 0.68 | NA | 0.00 | Isocitrate dehydrogenase [NAD] | IDH3G |
| (SEQ ID NO: 702) | | | | subunit gamma mitochondrial [221] | |
| ACPEK(ac)HFAFK | 0.68 | 0.00 | 0.00 | Protein FAM3C [67] | FAM3C |
| (SEQ ID NO: 703) | | | | | |
| KPTLDK(ac)PSPETFVK | 0.68 | 0.00 | NA | Estradiol 17-beta-dehydrogenase | HSD17B12 |
| (SEQ ID NO: 704) | | | | 12 [249] | |
| QLAQK(ac)YNCDK | 0.68 | 0.00 | 0.00 | Ubiquitin-60S ribosomal protein | UBA52 |
| (SEQ ID NO: 705) | | | | L40 [88] | |
| YTAQVDAEEK(ac)EDVK | 0.68 | 0.00 | 0.00 | Isoform 1 of ATP synthase subunit | ATP5H |
| (SEQ ID NO: 706) | | | | d mitochondrial [95] | |
| PLISPQTSHK(ac)TLSK | 0.69 | NA | NA | Isoform 2 of PDZ domain-containing | PDZD2 |
| (SEQ ID NO: 707) | | | | protein 2 [1726] | |
| ADK(ac)LAEEHSS | 0.70 | 0.00 | 0.00 | ATP synthase subunit beta | ATP5B |
| (SEQ ID NO: 708) | | | | mitochondrial [522] | |
| DFGSFDK(ac)FK (SEQ ID NO: 709) | 0.70 | NA | 0.00 | Superoxide dismutase [Mn] | SOD2 |
| | | | | mitochondrial [130] | |
| KIDK(ac)YTEVLK | 0.70 | 0.00 | NA | 60S ribosomal protein L13a [191] | SNORD32A, |
| (SEQ ID NO: 710) | | | | | RPL13A, |
| | | | | | SNORD33, |
| | | | | | SNORD34 |
| CSK(ac)LPSSTK(ac)SGWPR | 0.70 | 0.00 | 0.00 | cDNA FLJ75110 highly similar to | PHF15 |
| (SEQ ID NO: 711) | | | | Homo sapiens PHD finger protein | |
| | | | | 15 (PHF15) mRNA 3[2:38] | |
| KAINK(ac)AQK (SEQ ID NO: 712) | 0.70 | 0.00 | 0.00 | Histone H2B type 1-M [21] | HIST1H2BM |
| EFPEK(ac)QELHR | 0.70 | NA | NA | Protein zer-1 homolog [584] | ZER1 |
| (SEQ ID NO: 713) | | | | | |
| TDLEK(ac)DIISDTSGDFR | 0.71 | 0.00 | 0.00 | Putative annexin A2-like | ANXA2P2 |
| (SEQ ID NO: 714) | | | | protein [157] | |
| TPAQYDASELK(ac)ASMK | 0.72 | 0.00 | NA | Putative annexin A2-like | ANXA2P2 |
| (SEQ ID NO: 715) | | | | protein [115] | |
| LTCYLCK(ac)QK (SEQ ID NO: 716) | 0.72 | NA | NA | Isoform 1 of Bromodomain- | BRD1 |
| | | | | containing protein 1 [33]1 | |
| AINK(ac)AQK(ac)K | 0.72 | NA | NA | Histone H2B type 1-M [21:24] | HIST1H2BM |
| (SEQ ID NO: 717) | | | | | |
| KGIEK(ac)NLGIGK | 0.72 | 0.00 | 0.00 | Malate dehydrogenase mitochondrial | MDH2 |
| (SEQ ID NO: 718) | | | | [301] | |
| DNGK(ac)HALIIYDDLSK | 0.72 | 0.00 | NA | ATP synthase subunit alpha | ATP5A1 |
| (SEQ ID NO: 719) | | | | mitochondrial [305] | |
| QLYNIYAK(ac)HTK | 0.72 | NA | 0.00 | Putative ATP-dependent Clp | CLPP |
| (SEQ ID NO: 720) | | | | protease proteolytic subunit | |
| | | | | mitochondrial [211] | |
| GKGDK(ac)AQIEK | 0.73 | 0.00 | 0.00 | 60 kDa heat shock protein | HSPD1 |
| (SEQ ID NO: 721) | | | | mitochondrial [364] | |
| K(ac)FLVHNVK (SEQ ID NO: 722) | 0.73 | 0.00 | 0.00 | 60S ribosomal protein L32 [76] | RPL32 |
| GLIK(ac)LVSK (SEQ ID NO: 723) | 0.73 | NA | NA | 40S ribosomal protein S25 [98] | RPS25 |
| IGFAEK(ac)VAAK | 0.73 | 0.00 | NA | Isoform Mitochondrial of Fumarate | FH |
| (SEQ ID NO: 724) | | | | hydratase mitochondrial [292] | |
| (ac)AEK(ac)FDCHYCR | 0.73 | 0.00 | 0.00 | four and a half LIM domains | FHL1 |
| (SEQ ID NO: 725) | | | | protein 1 isoform 5 [20] | |
| GALPLDTVTFYK(ac)VIPK | 0.73 | 0.00 | 0.00 | Endoplasmic reticulum resident | ERP29 |
| (SEQ ID NO: 726) | | | | protein 29 [48] | |
| HWGGNVLGPK(ac)SVAR | 0.73 | NA | NA | 60S ribosomal protein L7a [245] | RPL7A, |
| (SEQ ID NO: 727) | | | | | SNORD24 |
| TITMK(ac)QLLR (SEQ ID NO: 728) | 0.73 | NA | 0.00 | Branched-chain-amino-acid | BCAT2 |
| | | | | aminotransferase [281] | |
| SK(ac)FVLVK (SEQ ID NO: 729) | 0.74 | NA | 0.00 | Endoplasmic reticulum resident | ERP29 |
| | | | | protein 29 [54] | |
| LVEDTK(ac)HRPK | 0.74 | NA | NA | 39S ribosomal protein L9 | MRPL9 |
| (SEQ ID NO: 730) | | | | mitochondrial [87] | |
| TVGQLYK(ac)EQLAK | 0.75 | NA | 0.00 | Isoform 1 of Myosin-9 [651] | MYH9 |
| (SEQ ID NO: 731) | | | | | |
| AAETCQEPK(ac)EFR | 0.75 | 0.00 | 0.00 | NADH dehydrogenase [ubiquinone] | NDUFAF4 |
| (SEQ ID NO: 732) | | | | 1 alpha subcomplex | |
| | | | | assembly factor 4 [91] | |
| VVLIGDSGVGK(ac)SNLLSR | 0.76 | 0.00 | NA | Ras-related protein Rab-11B [24] | RAB11B |
| (SEQ ID NO: 733) | | | | | |
| SGK(ac)YVLGYK (SEQ ID NO: 734) | 0.76 | 0.00 | NA | 60S ribosomal protein L30 [26] | RPL30 |
| ILMEHIHK(ac)LK | 0.76 | 0.00 | 0.00 | 60S ribosomal protein L19 [144] | RPL19 |
| (SEQ ID NO: 735) | | | | | |
| EK(ac)VFYSLMR (SEQ ID NO: 736) | 0.78 | NA | NA | Epoxide hydrolase 1 [288] | EPHX1 |
| K(ac)FDQLLAEEK | 0.78 | NA | 0.00 | Isoform 1 of Myosin-9 [1445] | MYH9 |
| (SEQ ID NO: 737) | | | | | |
| FVEFDMK(ac)PVCK | 0.79 | NA | 0.00 | Isoform 2 of LIM and senescent | LIMS2 |
| (SEQ ID NO: 738) | | | | cell antigen-like-containing | |
| | | | | domain protein 2 [326] | |
| K(ac)GFITVDGR (SEQ ID NO: 739) | 0.79 | NA | NA | Laminin subunit alpha-1 [2808] | LAMA1 |
| KAEAQIAAK(ac)NLDK | 0.80 | 0.00 | 0.00 | Aspartate aminotransferase | GOT2 |
| (SEQ ID NO: 740) | | | | mitochondrial [90] | |
| DK(ac)QFVAK (SEQ ID NO: 741) | 0.80 | NA | NA | Staphylococcal nuclease domain- | SND1 |
| | | | | containing protein 1 [341] | |
| AGACNTVIK(ac)QLMR | 0.82 | 0.00 | NA | Isoform SERCA3B of | ATP2A3 |
| (SEQ ID NO: 742) | | | | Sarcoplasmic/endoplasmic | |
| | | | | reticulum calcium ATPase | |
| | | | | 3 [476] | |
| KQQAK(ac)FDECVLDK | 0.82 | NA | NA | NADH dehydrogenase [ubiquinone] | NDUFA8 |
| (SEQ ID NO: 743) | | | | 1 alpha subcomplex | |
| | | | | subunit 8 [106] | |
| ALCTGEK(ac)GFGYK | 0.82 | 0.00 | 0.00 | Peptidyl-prolyl cis-trans | PPIF |
| (SEQ ID NO: 744) | | | | isomerase F mitochondrial [86] | |
| IYK(ac)SDGIK (SEQ ID NO: 745) | 0.83 | 0.00 | 0.00 | ADP/ATP translocase 2 [166] | SLC25A5 |
| DEGGK(ac)AFFK (SEQ ID NO: 746) | 0.84 | 0.00 | NA | ADP/ATP translocase 2 [268] | SLC25A5 |
| SYLK(ac)EFR (SEQ ID NO: 747) | 0.85 | NA | NA | Isoform 1 of Trans-23-enoyl-CoA | TECR |
| | | | | reductase [291] | |
| VPK(ac)TAENFR (SEQ ID NO: 748) | 0.85 | 0.00 | 0.00 | Peptidyl-prolyl cis-trans | PPID |
| | | | | isomerase D [43] | |
| VNCLDK(ac)FWHK | 0.85 | 0.00 | 0.00 | Isoform 1 of LIM and SH3 domain | LASP1 |
| (SEQ ID NO: 749) | | | | protein 1 [23] | |
| KGEDFVK(ac)TLK | 0.85 | NA | 0.00 | Malate dehydrogenase | MDH2 |
| (SEQ ID NO: 750) | | | | mitochondrial [335] | |
| EAEFTK(ac)SIAK | 0.86 | 0.00 | 0.00 | Signal peptidase complex | LOC653566, |
| (SEQ ID NO: 751) | | | | subunit 2 [191] | SPCS2 |
| SGYYK(ac)VLGK (SEQ ID NO: 752) | 0.86 | NA | NA | 60S ribosomal protein L27a [110] | RPL27A |
| YVLGYK(ac)QTLK | 0.87 | 0.00 | NA | 60S ribosomal protein L30 [32] | RPL30 |
| (SEQ ID NO: 753) | | | | | |
| FEDK(ac)TVAYTEQK | 0.88 | NA | 0.00 | Protein disulfide-isomerase | PDIA3 |
| (SEQ ID NO: 754) | | | | A3 [218] | |
| IVNALK(ac)SQVDK | 0.88 | 0.00 | NA | Ornithine aminotransferase | OAT |
| (SEQ ID NO: 755) | | | | mitochondrial [102] | |
| ILEFFGLK(ac)K (SEQ ID NO: 756) | 0.89 | 0.00 | 0.00 | Protein disulfide-isomerase [308] | P4HB |
| LCGQDLNK(ac)TSR | 0.89 | NA | NA | Isoform 1 of UDP-N- | DPAGT1 |
| (SEQ ID NO: 757) | | | | acetylglucosamine--dolichyl- | |
| | | | | phosphate N- | |
| | | | | acetylglucosaminephospho- | |
| | | | | transferase [48] | |
| VYFK(ac)DTHPK (SEQ ID NO: 758) | 0.90 | NA | NA | Isoform 1 of NADH-cytochrome b5 | CYB5R3 |
| | | | | reductase 3 [115] | |
| ILSK(ac)LSEETK | 0.91 | 0.00 | NA | Isoform 1 of E3 UFM1-protein | UFL1 |
| (SEQ ID NO: 759) | | | | ligase 1 [614] | |
| ATWK(ac)SNYFLK | 0.91 | NA | NA | 60S acidic ribosomal protein | RPLP0 |
| (SEQ ID NO: 760) | | | | P0 [10] | |
| AVDSQILPK(ac)IK | 0.92 | NA | NA | 60S ribosomal protein L6 [261] | RPL6 |
| (SEQ ID NO: 761) | | | | | |
| EK(ac)LQEEMLQR | 0.92 | NA | NA | Vimentin [188] | VIM |
| (SEQ ID NO: 762) | | | | | |
| MIYASSK(ac)DAIKK | 0.93 | 0.00 | 0.00 | Cofilin-1 [121] | CFL1 |
| (SEQ ID NO: 763) | | | | | |
| YNDPIYVK(ac)LEK | 0.93 | NA | 0.00 | Isoform A of AP-1 complex | AP1B1 |
| (SEQ ID NO: 764) | | | | subunit beta-1 [335] | |
| VTDDLVCLVYK(ac)TDQAQDVK | 0.93 | 0.00 | 0.00 | Isoform 1 of Signal recognition | SRP9 |
| (SEQ ID NO: 765) | | | | particle 9 kDa protein [52] | |
| TVVNK(ac)DVFR (SEQ ID NO: 766) | 0.94 | 0.00 | NA | 60S ribosomal protein L27 [98] | RPL27 |
| NLQEAEEWYK(ac)SK | 0.94 | 0.00 | 0.00 | Isoform 1 of Peripherin [288] | PRPH |
| (SEQ ID NO: 767) | | | | | |
| K(ac)FGGPGAR (SEQ ID NO: 768) | 0.97 | NA | NA | 40S ribosomal protein S16 [131] | RPS16 |
| LLLLGAGESGK(ac)STIVK | 0.97 | 0.00 | 0.00 | Guanine nucleotide-binding | GNAL |
| (SEQ ID NO: 769) | | | | protein G(olf) subunit | |
| | | | | alpha [55] | |
| SFVK(ac)VYNYNHLMPTR | 0.99 | NA | 0.00 | 60S ribosomal protein | RPL27 |
| (SEQ ID NO: 770) | | | | L27 [73] | |
| YVK(ac)ALFR (SEQ ID NO: 771) | 0.99 | NA | 0.00 | Mitochondrial import receptor | TOMM70A |
| | | | | subunit TOM70 [188] | |
| LEPLK(ac)PLK (SEQ ID NO: 772) | 1.00 | 0.00 | 0.00 | Isoform 3 of Proline-rich | PRR12 |
| | | | | protein 12 [1223] | |
| VGDK(ac)VLLPEYGGTK | 1.00 | 0.00 | 0.00 | 10 kDa heat shock protein | HSPE1 |
| (SEQ ID NO: 773) | | | | mitochondrial [70] | |
| GGVVGIK(ac)VDK | 1.00 | NA | 0.00 | Fructose-bisphosphate aldolase | ALDOA |
| (SEQ ID NO: 774) | | | | A [108] | |
| VAFK(ac)YCQK (SEQ ID NO: 775) | 1.00 | NA | NA | Isoform 1 of Dolichyl-phosphate | ALG5 |
| | | | | beta-glucosyltransferase [122] | |
| SVPHLQK(ac)VFDR | 1.00 | NA | 0.00 | Putative annexin A2-like | ANXA2P2 |
| (SEQ ID NO: 776) | | | | protein [227] | |
| VYK(ac)EMYK (SEQ ID NO: 777) | 1.00 | NA | 0.00 | Putative annexin A2-like | ANXA2P2 |
| | | | | protein [148] | |
| SELTGK(ac)FEK (SEQ ID NO: 778) | 1.00 | NA | 0.00 | Annexin A5 [76] | ANXA5 |
| EFIEK(ac)YDK (SEQ ID NO: 779) | 1.00 | 0.00 | 0.00 | Annexin A6 [644] | ANXA6 |
| ESCSK(ac)HASGTSFHLPQPSFR | 1.00 | 0.00 | NA | Bromodomain and PHD finger- | BRPF3 |
| (SEQ ID NO: 780) | | | | containing protein 3 [105] | |
| KAEAAVVAVAEK(ac)R | 1.00 | NA | NA | Selenoprotein H [20] | C11orf31 |
| (SEQ ID NO: 781) | | | | | |
| VNK(ac)EVER (SEQ ID NO: 782) | 1.00 | NA | NA | Isoform Long of ES1 protein | C21orf33 |
| | | | | homolog mitochondrial [157] | |
| GFSIPECQK(ac)LLPK | 1.00 | NA | NA | Citrate synthase mitochondrial | CS |
| (SEQ ID NO: 783) | | | | [103] | |
| QNIILK(ac)NDK (SEQ ID NO: 784) | 1.00 | NA | NA | Uncharacterized protein | CXorf59 |
| | | | | CXorf59 [13] | |
| NEEATK(ac)HLECTK | 1.00 | NA | NA | Isoform 1 of Fragile X mental | FXR1 |
| (SEQ ID NO: 785) | | | | retardation syndrome-related | |
| | | | | protein 1 [207] | |
| AGK(ac)DSGK(ac)AK | 1.00 | NA | NA | Histone H2A.V [8:12] | H2AFV |
| (SEQ ID NO: 786) | | | | | |
| ESK(ac)ALMGLYHGQVLCK | 1.00 | NA | NA | Trifunctional enzyme subunit alpha | HADHA |
| (SEQ ID NO: 787) | | | | mitochondrial [337] | |
| FGAPQK(ac)DVK (SEQ ID NO: 788) | 1.00 | 0.00 | 0.00 | Trifunctional enzyme subunit alpha | HADHA |
| | | | | mitochondrial [359] | |
| ILQEGVDPK(ac)K | 1.00 | 0.00 | 0.00 | Trifunctional enzyme subunit alpha | HADHA |
| (SEQ ID NO: 789) | | | | mitochondrial [569] | |
| GSK(ac)K(ac)AITK | 1.00 | NA | NA | Histone H2B type 1-B [16:17] | HIST1H2BB |
| (SEQ ID NO: 790) | | | | | |
| PEPTK(ac)SAPAPK(ac)K | 1.00 | NA | NA | Histone H2B type 1-D [6:12] | HIST1H2BD |
| (SEQ ID NO: 791) | | | | | |
| GSK(ac)K(ac)AINK | 1.00 | 0.00 | NA | Histone H2B type 1-M [16:17] | HIST1H2BM |
| (SEQ ID NO: 792) | | | | | |
| K(ac)AINK(ac)AQK | 1.00 | 0.00 | 0.00 | Histone H2B type 1-M [17:21] | HIST1H2BM |
| (SEQ ID NO: 793) | | | | | |
| K(ac)AVTK(ac)AQK | 1.00 | NA | NA | Histone H2B type 2-E [17:21] | HIST2H2BE |
| (SEQ ID NO: 794) | | | | | |
| PEPAK(ac)SAPAPKK | 1.00 | NA | NA | Histone H2B type 2-E [6] | HIST2H2BE |
| (SEQ ID NO: 795) | | | | | |
| K(ac)QLATK(ac)AAR | 1.00 | 0.00 | NA | Histone H3.2 [19:24] | HIST2H3D, |
| (SEQ ID NO: 796) | | | | | HIST2H3A, |
| | | | | | HIST2H3C |
| TEMDWVLK(ac)HSGPNSADSANDGFVR | 1.00 | NA | 0.00 | Heterogeneous nuclear | HNRNPF |
| (SEQ ID NO: 797) | | | | ribonucleoprotein F [98] | |
| ADLIK(ac)QYGR (SEQ ID NO: 798) | 1.00 | 0.00 | NA | Inactive hydroxysteroid | HSDL1 |
| | | | | dehydrogenase-like protein 1 [64] | |
| FYEQFSK(ac)NIK | 1.00 | NA | NA | Isoform 2 of Heat shock protein | HSP90AA1 |
| (SEQ ID NO: 799) | | | | HSP 90-alpha [565] | |
| LMK(ac)ICMNEDPAK | 1.00 | NA | 0.00 | Integrin-linked protein kinase | ILK |
| (SEQ ID NO: 800) | | | | [426] | |
| (ac)ASPSLERPEK(ac)GAGK | 1.00 | 0.00 | NA | KRR1 small subunit processome | KRR1 |
| (SEQ ID NO: 801) | | | | component homolog [11] | |
| INKALDK(ac)TK (SEQ ID NO: 802) | 1.00 | NA | NA | Isoform 1 of Myosin-9 [439] | MYH9 |
| IANILK(ac)DKDPPIPVAK | 1.00 | NA | NA | Protein disulfide-isomerase | PDIA4 |
| (SEQ ID NO: 803) | | | | A4 [109] | |
| NTEDLQCYVK(ac)PTK | 1.00 | NA | NA | Protein Jade-3 [735] | PHF16 |
| (SEQ ID NO: 804) | | | | | |
| VDEVK(ac)STIK (SEQ ID NO: 805) | 1.00 | NA | 0.00 | 60S ribosomal protein L10a [152] | RPL10A |
| KLQK(ac)AALLK (SEQ ID NO: 806) | 1.00 | NA | NA | Ribosomal protein L14 | RPL14 |
| | | | | variant [132] | |
| YSVDIPLDK(ac)TVVNK | 1.00 | 0.00 | 0.00 | 60S ribosomal protein L27 [93] | RPL27 |
| (SEQ ID NO: 807) | | | | | |
| LNK(ac)AVWAK (SEQ ID NO: 808) | 1.00 | NA | 0.00 | 60S ribosomal protein L31 [70] | RPL31 |
| K(ac)FGQGSR (SEQ ID NO: 809) | 1.00 | NA | NA | 40S ribosomal protein S29 [13] | RPS29 |
| DQTK(ac)SIVEK (SEQ ID NO: 810) | 1.00 | 0.00 | NA | Isoform 3 of Reticulon-3 [217] | RTN3 |
| YMVK(ac)SCGK (SEQ ID NO: 811) | 1.00 | 0.00 | 0.00 | 60S ribosomal protein L10 [78] | SNORA70, |
| | | | | | RPL10 |
| LAHEVGWK(ac)YQAVTATLEEK | 1.00 | 0.00 | 0.00 | 60S ribosomal protein L13a [148] | SNORD32A, |
| (SEQ ID NO: 812) | | | | SNORD33, SNORD34 | RPL13A, |
| ALEK(ac)IDLK (SEQ ID NO: 813) | 1.00 | 0.00 | NA | 60S ribosomal protein L3 [362] | SNORD43, |
| | | | | | RPL3 |
| AMMEK(ac)LVK(ac)SISQLK | 1.00 | NA | NA | Isoform 1 of Signal | STAT2 |
| (SEQ ID NO: 814) | | | | transducer and activator of | |
| | | | | transcription 2 [158:161] | |
| LLGITK(ac)ECVMR | 1.00 | NA | NA | Talin-1 [334] | TLN1 |
| (SEQ ID NO: 815) | | | | | |
| GK(ac)GK(ac)AGR | 1.00 | NA | NA | Tubulin polymerization-promoting | TPPP |
| (SEQ ID NO: 816) | | | | protein [187:189] | |
| LGDVISIQPCPDVK(ac)YGK | 1.00 | NA | 0.00 | Transitional endoplasmic reticulum | VCP |
| (SEQ ID NO: 817) | | | | ATPase [109] | |

### Example 2

### CNP Analysis

[0093] This example describes the CNP analysis that was performed on Compound B treated cells from Example 1.

[0094] The SILAC method was performed as described in Example 1.

[0095] The harvested “heavy” and “light” labeled cells were initially lysed with 2×NETN buffer (200 mM NaCl, 100 mM Tris-Cl, 2 mM EDTA, 1.0% NP-40, pH 7.2) on ice for 15 min, respectively. The supernatants were saved after 20,000×g centrifugation for 10 minutes at 4° C. After measurement of the protein concentration in “heavy” or “light” labeled supernatants, equal amounts of crude proteins in supernatant were mixed, and the crude proteins were precipitated by adding trifluoroacetic acid (TFA) with 15% final concentration (v/v) (this was called the cytosolic fraction). After washing twice with −20° C. acetone, the proteins pellets were dissolved in 100 mM NH₄HCO₃ (pH 8.0) for trypsin digestion.

[0096] The remaining cell pellets were further lysed with 1×ETN buffer (100 mM NaCl, 50 mM Tris-Cl, 1 mM EDTA, pH 7.2) supplemented with 0.5% Triton X-100 on ice for 15 min, respectively. The resulting lysates were clarified by 20,000×g centrifugation for 10 minutes, and the supernatant was saved as nuclear extracts fractions. After measurement of the protein concentration in “heavy” or “light” labeled supernatant, equal amount of crude proteins in supernatant were mixed, and the crude proteins were precipitated by adding trifluoroacetic acid (TFA) with 15% final concentration (v/v) (this was called the nuclear extracts fraction). After washing twice with −20° C. acetone, the proteins pellets were dissolved in 100 mM NH₄HCO₃ (pH 8.0) for trypsin digestion.

[0097] The final remaining cell pellets were dissolved in 8 M urea to extract the chromatin-binding proteins. After measurement of protein concentration, equal amount of chromatin-binding proteins in urea solution were mixed, and the proteins were precipitated by adding trifluoroacetic acid (TFA) with 15% final concentration (v/v) (this was called the nuclear pellet fraction). After washing twice with −20° C. acetone, the proteins pellets were dissolved in 100 mM NH₄HCO₃ for trypsin digestion.

[0098] After trypsin digestion for the above three fractions, the Kac affinity enrichment followed by MS analysis and data inquiry were separately performed. The combined Kac data formed the total Kac profiling data in the pair of Compound B vs DMSO.

[0099] Compound B treated cell lysate was fractionated into three subcellular fractions—cytoplasm (C), soluble nuclear extract (N), and insoluble nuclear pellet (P), as described above. Any peptides identified as HDAC6 specific in Example 1 with this subcellular localization information was extremely helpful for understanding their functions inside cells.

[0100] The results of these studies are shown in Table 2.

[0101] The first column of Table 2 shows the amino acid sequence of the acetylated peptide that was identified by the SILAC method, wherein “(ac)” means that the previous amino acid was acetylated. This column is identical to the first column in Table 1.

[0102] The second column of Table 2 shows the gene symbol for the peptide in column 1 This column is identical to the sixth column in Table 1.

[0103] The third, fourth, and fifth columns of Table 2 show data for Compound B. A “+” indicates a 1.3 fold change or greater in the quantity of peptide when normalized to the total (C+N+P=total) for each peptide for each drug treated group of cells. A “−” indicates a 1.29 fold change or less in the quantity of peptide when normalized to the total (C+N+P=total) for each peptide for each drug treated group of cells. “None” indicates unknown.

[0104] The sixth, seventh, and eighth columns of Table 2 show data for Compound B. The numbers in these columns represent the fold change in the quantity of peptide when normalized to the total (C+N+P=total) for each peptide for each drug treated group of cells. The numbers are in a log 2 scale so 1 represents a 2× change, 0 represents no change, and None represents unknown.

TABLE 2

| Peptide | Gene | C | N | P | C | N | P |
|---|---|---|---|---|---|---|---|
| FK(ac)ESFAEMNR (SEQ ID NO: 1) | COX4I1 | − | + | − | NA | −0.72 | NA |
| ELNK(ac)ILEGR (SEQ ID NO: 2) | DLAT | + | − | − | 0.47 | NA | NA |
| AAEVLNK(ac)HSLSGRPLK (SEQ ID NO: 3) | HNRNPM | − | − | + | NA | NA | −0.74 |
| LYK(ac)EELEQTYHAK (SEQ ID NO: 4) | LMNB1 | − | − | + | NA | NA | 0.48 |
| TLVLSDK(ac)HSPQK(ac)K | MLL3 | − | + | + | 0.33 | 0.40 | 0.50 |
| (SEQ ID NO: 5) | | | | | | | |
| (ac)CNTPTYCDLGK(ac)AAK | VDAC3 | − | + | − | NA | −0.63 | NA |
| (SEQ ID NO: 6) | | | | | | | |
| LGTDESK(ac)FNAVLCSR (SEQ ID NO: 7) | ANXA11 | + | − | − | 0.50 | NA | NA |
| SFDSEFK(ac)LACK (SEQ ID NO: 8) | DYNC1H1 | + | − | − | 0.51 | NA | NA |
| EPVAVLK(ac)ANR (SEQ ID NO: 9) | HEXB | − | + | − | NA | −0.40 | NA |
| LNK(ac)DQWEER (SEQ ID NO: 10) | MSN | − | + | − | NA | 0.71 | NA |
| DFLAGGVAAAISK(ac)TAVAPIER | SLC25A5 | − | + | − | NA | −0.43 | NA |
| (SEQ ID NO: 11) | | | | | | | |
| YYNK(ac)YINVK (SEQ ID NO: 12) | ATP5J2 | + | − | + | −0.45 | 0.11 | −0.53 |
| TNK(ac)NK(ac)SSISR (SEQ ID NO: 13) | CREBBP | + | + | + | 0.62 | 0.63 | 0.59 |
| TSK(ac)NK(ac)SSLSR (SEQ ID NO: 14) | EP300 | + | + | − | 0.44 | 0.40 | NA |
| AGGK(ac)AGK(ac)DSGK (SEQ ID NO: 15) | H2AFV | − | − | + | NA | NA | 0.87 |
| PDPAK(ac)SAPAPK(ac)K | HIST1H2BO | + | + | + | 0.66 | 0.49 | 0.95 |
| (SEQ ID NO: 16) | | | | | | | |
| YLTNQK(ac)NSNSK(ac)NDR | MEAF6 | − | + | − | NA | 0.43 | NA |
| (SEQ ID NO: 17) | | | | | | | |
| GVTQFGNK(ac)YIQQTKPLTLER | NUDT21 | + | + | + | 0.50 | 0.50 | 0.50 |
| (SEQ ID NO: 18) | | | | | | | |
| IHNFGLIQEK(ac)LAR (SEQ ID NO: 19) | ACADVL | NONE | NONE | NONE | NONE | NONE | NONE |
| LDHLAEK(ac)FR (SEQ ID NO: 20) | ACTN1 | NONE | NONE | NONE | NONE | NONE | NONE |
| LK(ac)DISTLEPLKK (SEQ ID NO: 21) | ANP32B | NONE | NONE | NONE | NONE | NONE | NONE |
| QRQEVCQSYK(ac)SLYGK (SEQ ID NO: 22) | ANXA6 | NONE | NONE | NONE | NONE | NONE | NONE |
| MYFDK(ac)YVLKPATEGK (SEQ ID NO: 23) | ATAD3A | + | − | − | 0.41 | −0.30 | 0.20 |
| IVEYEK(ac)EMEK (SEQ ID NO: 24) | ATP5H | NONE | NONE | NONE | NONE | NONE | NONE |
| FYGDEEK(ac)DKGLQTSQDAR | CALR | NONE | NONE | NONE | NONE | NONE | NONE |
| (SEQ ID NO: 25) | | | | | | | |
| ALEHFTDLYDIK(ac)R (SEQ ID NO: 26) | CLTC | NONE | NONE | NONE | NONE | NONE | NONE |
| KYEFSPOTLCCYGK(ac)QLCTIPR | CREBBP | NONE | NONE | NONE | NONE | NONE | NONE |
| (SEQ ID NO: 27) | | | | | | | |
| ALK(ac)DLYCHK (SEQ ID NO: 28) | CREM | NONE | NONE | NONE | NONE | NONE | NONE |
| LYCPK(ac)CMDVYTPK (SEQ ID NO: 29) | CSNK2B | NONE | NONE | NONE | NONE | NONE | NONE |
| FK(ac)DPNCVGIVLASR (SEQ ID NO: 30) | DAZAP1 | NONE | NONE | NONE | NONE | NONE | NONE |
| APTIVGK(ac)SSLNPILFR | DDOST | NONE | NONE | NONE | NONE | NONE | NONE |
| (SEQ ID NO: 31) | | | | | | | |
| FEK(ac)NFYVEHPEVAR (SEQ ID NO: 32) | DDX17 | NONE | NONE | NONE | NONE | NONE | NONE |
| DWVLNEFK(ac)HGK (SEQ ID NO: 33) | DDX5 | NONE | NONE | NONE | NONE | NONE | NONE |
| FGNPGEK(ac)LVK (SEQ ID NO: 34) | DDX5 | NONE | NONE | NONE | NONE | NONE | NONE |
| VVK(ac)HPIFER (SEQ ID NO: 35) | DNAJB11 | NONE | NONE | NONE | NONE | NONE | NONE |
| TCEESSFCK(ac)R (SEQ ID NO: 36) | GANAB | NONE | NONE | NONE | NONE | NONE | NONE |
| ASGLAAGK(ac)GVIVAK (SEQ ID NO: 37) | GART | − | − | + | 0.20 | 0.17 | 0.43 |
| IIVDELK(ac)QEVISTSSK | GNB2L1 | NONE | NONE | NONE | NONE | NONE | NONE |
| (SEQ ID NO: 38) | | | | | | | |
| LVK(ac)VWNLANCK (SEQ ID NO: 39) | GNB2L1 | NONE | NONE | NONE | NONE | NONE | NONE |
| (ac)AHYNFK(ac)K (SEQ ID NO: 40) | GTPBP4 | NONE | NONE | NONE | NONE | NONE | NONE |
| GQQQVFK(ac)GLNDK (SEQ ID NO: 41) | HADHA | NONE | NONE | NONE | NONE | NONE | NONE |
| K(ac)HPDSSVNFAEFSK (SEQ ID NO: 42) | HMGB2 | NONE | NONE | NONE | NONE | NONE | NONE |
| RGEEGHDPK(ac)EPEQLR (SEQ ID NO: 43) | HNRNPA3 | NONE | NONE | NONE | NONE | NONE | NONE |
| AFITNIPFDVK(ac)WQSLK | HNRNPM | NONE | NONE | NONE | NONE | NONE | NONE |
| (SEQ ID NO: 44) | | | | | | | |
| VK(ac)VLFVR (SEQ ID NO: 45) | HNRNPR | NONE | NONE | NONE | NONE | NONE | NONE |
| GYFEYIEENK(ac)YSR (SEQ ID NO: 46) | HNRNPU | NONE | NONE | NONE | NONE | NONE | NONE |
| TTWVTK(ac)HAAENPGK (SEQ ID NO: 47) | HNRNPU | NONE | NONE | NONE | NONE | NONE | NONE |
| EELVK(ac)NLGTIAK (SEQ ID NO: 48) | HSP90B1 | NONE | NONE | NONE | NONE | NONE | NONE |
| ELISNASDALDK(ac)IR (SEQ ID NO: 49) | HSP90B1 | NONE | NONE | NONE | NONE | NONE | NONE |
| ETLQQHK(ac)LLK (SEQ ID NO: 50) | HSP90B1 | NONE | NONE | NONE | NONE | NONE | NONE |
| IADDK(ac)YNDTFWK (SEQ ID NO: 51) | HSP90B1 | NONE | NONE | NONE | NONE | NONE | NONE |
| NK(ac)EIFLR (SEQ ID NO: 52) | HSP90B1 | − | − | + | 0.01 | 0.04 | 0.41 |
| IINEPTAAAIAYGLDK(ac)R | HSPA5 | NONE | NONE | NONE | NONE | NONE | NONE |
| (SEQ ID NO: 53) | | | | | | | |
| NQLTSNPENTVFDAK(ac)R | HSPA5 | NONE | NONE | NONE | NONE | NONE | NONE |
| (SEQ ID NO: 54) | | | | | | | |
| NQVAMNPTNTVFDAK(ac)R | HSPA8 | NONE | NONE | NONE | NONE | NONE | NONE |
| (SEQ ID NO: 55) | | | | | | | |
| YAASSYLSLTPEQWK(ac)SHR | IGLV2-14, | NONE | NONE | NONE | NONE | NONE | NONE |
| (SEQ ID NO: 56) | IGLC2 | | | | | | |
| IHLEIK(ac)QLNR (SEQ ID NO: 57) | LMAN1 | NONE | NONE | NONE | NONE | NONE | NONE |
| LYKEELEQTYHAK(ac)LENAR | LMNB1 | NONE | NONE | NONE | NONE | NONE | NONE |
| (SEQ ID NO: 58) | | | | | | | |
| GFGYK(ac)GSCFHR (SEQ ID NO: 59) | LOC390956 | NONE | NONE | NONE | NONE | NONE | NONE |
| ICCQFDFK(ac)R (SEQ ID NO: 60) | MAN2A1 | NONE | NONE | NONE | NONE | NONE | NONE |
| ADKDYHFK(ac)VDNDENEHQLSLR | NPM1 | NONE | NONE | NONE | NONE | NONE | NONE |
| (SEQ ID NO: 61) | | | | | | | |
| FINYVK(ac)NCFR (SEQ ID NO: 62) | NPM1 | NONE | NONE | NONE | NONE | NONE | NONE |
| SGVGNVFIK(ac)NLDK (SEQ ID NO: 63) | PABPC4 | NONE | NONE | NONE | NONE | NONE | NONE |
| GEK(ac)FVMQEEFSR (SEQ ID NO: 64) | PDIA3 | NONE | NONE | NONE | NONE | NONE | NONE |
| PSHLTNK(ac)FEDK (SEQ ID NO: 65) | PDIA3 | NONE | NONE | NONE | NONE | NONE | NONE |
| YGVSGYPTLK(ac)IFR (SEQ ID NO: 66) | PDIA3 | NONE | NONE | NONE | NONE | NONE | NONE |
| SLLGK(ac)DVLFLK (SEQ ID NO: 67) | PGK1 | NONE | NONE | NONE | NONE | NONE | NONE |
| SIYGEK(ac)FEDENFILK (SEQ ID NO: 68) | PPIA | NONE | NONE | NONE | NONE | NONE | NONE |
| TVPK(ac)TVDNFVALATGEK | PPIB | NONE | NONE | NONE | NONE | NONE | NONE |
| (SEQ ID NO: 69) | | | | | | | |
| VIFGLFGK(ac)TVPK (SEQ ID NO: 70) | PPIB | NONE | NONE | NONE | NONE | NONE | NONE |
| VIK(ac)DFMIQGGDFTR (SEQ ID NO: 71) | PPIB | NONE | NONE | NONE | NONE | NONE | NONE |
| IYGFYDECK(ac)R (SEQ ID NO: 72) | PPP1CC | NONE | NONE | NONE | NONE | NONE | NONE |
| EIDSVK(ac)YLECSALTQR | RAC2 | NONE | NONE | NONE | NONE | NONE | NONE |
| (SEQ ID NO: 73) | | | | | | | |
| (ac)ADK(ac)EAAFDDAVEER | RBBP4 | NONE | NONE | NONE | NONE | NONE | NONE |
| (SEQ ID NO: 74) | | | | | | | |
| ACFYNLDK(ac)FR (SEQ ID NO: 75) | RBM17 | NONE | NONE | NONE | NONE | NONE | NONE |
| LGLGEGAEEK(ac)SIPTLISR | RCC1 | NONE | NONE | NONE | NONE | NONE | NONE |
| (SEQ ID NO: 76) | | | | | | | |
| TGCIGAK(ac)HR (SEQ ID NO: 77) | RPL11 | NONE | NONE | NONE | NONE | NONE | NONE |
| WFQQK(ac)YDGIILPGK (SEQ ID NO: 78) | RPL11 | NONE | NONE | NONE | NONE | NONE | NONE |
| IFAPNHVVAK(ac)SR (SEQ ID NO: 79) | RPL18A | NONE | NONE | NONE | NONE | NONE | NONE |
| IEHIK(ac)HSK (SEQ ID NO: 80) | RPL21, | NONE | NONE | NONE | NONE | NONE | NONE |
| | SNORD102, | | | | | | |
| | SNORA27, | | | | | | |
| | RPL21P19 | | | | | | |
| YLK(ac)YLTK (SEQ ID NO: 81) | RPL22 | NONE | NONE | NONE | NONE | NONE | NONE |
| INFDK(ac)YHPGYFGK (SEQ ID NO: 82) | RPL27A | NONE | NONE | NONE | NONE | NONE | NONE |
| FIDTTSK(ac)FGHGR (SEQ ID NO: 83) | RPL3L | NONE | NONE | NONE | NONE | NONE | NONE |
| AASLK(ac)SNYNLPMHK (SEQ ID NO: 84) | RPL4 | NONE | NONE | NONE | NONE | NONE | NONE |
| LNILK(ac)LAPGGHVGR (SEQ ID NO: 85) | RPL4 | NONE | NONE | NONE | NONE | NONE | NONE |
| NFLGEK(ac)YIR (SEQ ID NO: 86) | RPL9 | NONE | NONE | NONE | NONE | NONE | NONE |
| VANVSLLALYK(ac)GK (SEQ ID NO: 87) | RPS23 | NONE | NONE | NONE | NONE | NONE | NONE |
| LAVLK(ac)YYK (SEQ ID NO: 88) | RPS27A | − | + | − | 0.03 | 0.68 | 0.01 |
| LK(ac)YALTGDEVKK (SEQ ID NO: 89) | RPS4X | NONE | NONE | NONE | NONE | NONE | NONE |
| SFQK(ac)IQVR (SEQ ID NO: 90) | RPS7 | NONE | NONE | NONE | NONE | NONE | NONE |
| ELLTLDEK(ac)DPR (SEQ ID NO: 91) | RPS9 | NONE | NONE | NONE | NONE | NONE | NONE |
| LQTQVFK(ac)LGLAK (SEQ ID NO: 92) | RPS9 | NONE | NONE | NONE | NONE | NONE | NONE |
| (ac)ATETVELHK(ac)LK (SEQ ID NO: 93) | SARNP | NONE | NONE | NONE | NONE | NONE | NONE |
| LAELK(ac)QECLAR (SEQ ID NO: 94) | SARNP | NONE | NONE | NONE | NONE | NONE | NONE |
| ANLVFK(ac)EIEK (SEQ ID NO: 95) | SCP2 | NONE | NONE | NONE | NONE | NONE | NONE |
| EGQNWLEK(ac)K (SEQ ID NO: 96) | SEC11C | NONE | NONE | NONE | NONE | NONE | NONE |
| GFGFIK(ac)LESR (SEQ ID NO: 97) | SFPQ | NONE | NONE | NONE | NONE | NONE | NONE |
| LFAK(ac)YGEPGEVFINK (SEQ ID NO: 98) | SFPQ | NONE | NONE | NONE | NONE | NONE | NONE |
| YGEPGEVFINK(ac)GK (SEQ ID NO: 99) | SFPQ | NONE | NONE | NONE | NONE | NONE | NONE |
| YIYDSAFHPDTGEK(ac)MILIGR | SFXN1 | NONE | NONE | NONE | NONE | NONE | NONE |
| (SEQ ID NO: 100) | | | | | | | |
| LVESLPQEIK(ac)ANVAK (SEQ ID NO: 101) | SLC25A10 | NONE | NONE | NONE | NONE | NONE | NONE |
| AFFK(ac)GAWSNVLR (SEQ ID NO: 102) | SLC25A5 | NONE | NONE | NONE | NONE | NONE | NONE |
| YFPTQALNFAFK(ac)DK (SEQ ID NO: 103) | SLC25A5 | NONE | NONE | NONE | NONE | NONE | NONE |
| TWEK(ac)LLLAAR (SEQ ID NO: 104) | SNORA6, | NONE | NONE | NONE | NONE | NONE | NONE |
| | RPSAP15, | | | | | | |
| | SNORA62, | | | | | | |
| | RPSA | | | | | | |
| YLMEEDEDAYK(ac)K (SEQ ID NO: 105) | SNORD21, | NONE | NONE | NONE | NONE | NONE | NONE |
| | RPL5 | | | | | | |
| TVFAEHISDECK(ac)R (SEQ ID NO: 106) | SNORD43, | NONE | NONE | NONE | NONE | NONE | NONE |
| | RPL3 | | | | | | |
| TKDIEDVFYK(ac)YGAIR (SEQ ID NO: 107) | SRSF1 | NONE | NONE | NONE | NONE | NONE | NONE |
| (ac)AEPSAPESK(ac)HK (SEQ ID NO: 108) | STT3B | NONE | NONE | NONE | NONE | NONE | NONE |
| INVYYNEATGGK(ac)YVPR | TUBB2C | NONE | NONE | NONE | NONE | NONE | NONE |
| (SEQ ID NO: 109) | | | | | | | |
| ILAEGGGAK(ac)FK (SEQ ID NO: 110) | TUFM | NONE | NONE | NONE | NONE | NONE | NONE |
| QIESK(ac)TAFQEALDAAGDK | TXN | NONE | NONE | NONE | NONE | NONE | NONE |
| (SEQ ID NO: 111) | | | | | | | |
| LFKPGQEAVK(ac)YQGPR | TXNDC5, | NONE | NONE | NONE | NONE | NONE | NONE |
| (SEQ ID NO: 112) | MUTED, | | | | | | |
| | MUTED- | | | | | | |
| | TXNDC5 | | | | | | |
| VYVAK(ac)VDCTAHSDVCSAQGVR | TXNDC5, | NONE | NONE | NONE | NONE | NONE | NONE |
| (SEQ ID NO: 113) | MUTED, | | | | | | |
| | MUTED- | | | | | | |
| | TXNDC5 | | | | | | |
| VVVTK(ac)YCDPDSYHR (SEQ ID NO: 114) | U2AF2 | NONE | NONE | NONE | NONE | NONE | NONE |
| FGIAAK(ac)YQIDPDACFSAK | VDAC1 | − | + | − | 0.21 | −0.68 | 0.28 |
| (SEQ ID NO: 115) | | | | | | | |
| YK(ac)WCEYGLTFTEK (SEQ ID NO: 116) | VDAC2 | − | + | + | NA | −0.70 | 0.47 |
| YK(ac)VCNYGLTFTQK (SEQ ID NO: 117) | VDAC3 | − | + | + | 0.17 | −0.89 | 0.62 |
| FANYIDK(ac)VR (SEQ ID NO: 118) | VIM | − | + | − | NA | −0.50 | −0.02 |
| ILLAELEQLK(ac)GQGK (SEQ ID NO: 119) | VIM | − | + | − | NA | −0.48 | 0.10 |
| LQDEIQNMK(ac)EEMAR (SEQ ID NO: 120) | VIM | − | + | − | NA | −0.50 | −0.08 |
| SK(ac)FADLSEAANR (SEQ ID NO: 121) | VIM | − | + | − | 0.01 | −0.47 | 0.08 |
| TNEK(ac)VELQELNDR (SEQ ID NO: 122) | VIM | − | + | − | NA | −0.62 | 0.15 |
| ALQEK(ac)VEIK (SEQ ID NO: 123) | XRCC5 | NONE | NONE | NONE | NONE | NONE | NONE |
| (ac)SIMSYNGGAIMAMK(ac)GK | — | NONE | NONE | NONE | NONE | NONE | NONE |
| (SEQ ID NO: 124) | | | | | | | |
| NLQK(ac)EVIHR (SEQ ID NO: 125) | ACOX1 | NONE | NONE | NONE | NONE | NONE | NONE |
| LVDQSGPPHEPK(ac)FVYQAK | ADAR | NONE | NONE | NONE | NONE | NONE | NONE |
| (SEQ ID NO: 126) | | | | | | | |
| HLSDSINQK(ac)HFEQAIER | AFG3L2 | NONE | NONE | NONE | NONE | NONE | NONE |
| (SEQ ID NO: 127) | | | | | | | |
| DAISGIGTDEK(ac)CLIEILASR | ANXA6 | NONE | NONE | NONE | NONE | NONE | NONE |
| (SEQ ID NO: 128) | | | | | | | |
| DLMTDLK(ac)SEISGDLAR | ANXA6 | NONE | NONE | NONE | NONE | NONE | NONE |
| (SEQ ID NO: 129) | | | | | | | |
| GTVRPANDFNPDADAK(ac)ALR | ANXA6 | NONE | NONE | NONE | NONE | NONE | NONE |
| (SEQ ID NO: 130) | | | | | | | |
| LENK(ac)MEGIGLK (SEQ ID NO: 131) | ARL6IP5 | NONE | NONE | NONE | NONE | NONE | NONE |
| EQEHMINWVEK(ac)HVVQSISTQQEK | ATP5F1 | NONE | NONE | NONE | NONE | NONE | NONE |
| (SEQ ID NO: 132) | | | | | | | |
| LNEQK(ac)LAQLEEAK (SEQ ID NO: 133) | ATP5F1 | NONE | NONE | NONE | NONE | NONE | NONE |
| YGPFVADFADK(ac)LNEQK | ATP5F1 | NONE | NONE | NONE | NONE | NONE | NONE |
| (SEQ ID NO: 134) | | | | | | | |
| SCAEWVSLSK(ac)AR (SEQ ID NO: 135) | ATP5H | NONE | NONE | NONE | NONE | NONE | NONE |
| VNLQNNPGAMEHFHMK(ac)LFR | BCAP31 | NONE | NONE | NONE | NONE | NONE | NONE |
| (SEQ ID NO: 136) | | | | | | | |
| LTALDYHNPAGFNCK(ac)DETEFR | C14orf166 | NONE | NONE | NONE | NONE | NONE | NONE |
| (SEQ ID NO: 137) | | | | | | | |
| IYFTDSSSK(ac)WQR (SEQ ID NO: 138) | C20orf3 | NONE | NONE | NONE | NONE | NONE | NONE |
| TPELNLDQFHDK(ac)TPYTIMFGPDK | CANX | NONE | NONE | NONE | NONE | NONE | NONE |
| (SEQ ID NO: 139) | | | | | | | |
| YIAK(ac)QESVEER (SEQ ID NO: 140) | CCDC144A | NONE | NONE | NONE | NONE | NONE | NONE |
| EDQK(ac)PVMDDQR (SEQ ID NO: 141) | CD74 | NONE | NONE | NONE | NONE | NONE | NONE |
| SHLIDK(ac)GMLTSTTEDE | CDS2 | NONE | NONE | NONE | NONE | NONE | NONE |
| (SEQ ID NO: 142) | | | | | | | |
| (ac)SVFGK(ac)LFGAGGGK | CHMP4B | NONE | NONE | NONE | NONE | NONE | NONE |
| (SEQ ID NO: 143) | | | | | | | |
| STTELPLTVSYDK(ac)VSLGR | CLPTM1L | NONE | NONE | NONE | NONE | NONE | NONE |
| (SEQ ID NO: 144) | | | | | | | |
| DCDHADEQK(ac)CYSCGEFGHIQK | CNBP | NONE | NONE | NONE | NONE | NONE | NONE |
| (SEQ ID NO: 145) | | | | | | | |
| GPIGSIGPK(ac)GIPGEDGYR | COL6A3 | NONE | NONE | NONE | NONE | NONE | NONE |
| (SEQ ID NO: 146) | | | | | | | |
| YLLYGEK(ac)GTGK (SEQ ID NO: 147) | DAP3 | NONE | NONE | NONE | NONE | NONE | NONE |
| NIDPK(ac)PCTPR (SEQ ID NO: 148) | DAZAP1 | − | + | − | 0.34 | 0.60 | 0.11 |
| FNQK(ac)GEVYK (SEQ ID NO: 149) | DBT | NONE | NONE | NONE | NONE | NONE | NONE |
| WVFK(ac)EEGVLR (SEQ ID NO: 150) | DDOST | − | + | − | NA | −0.90 | NA |
| SK(ac)EITVR (SEQ ID NO: 151) | DDX5 | NONE | NONE | NONE | NONE | NONE | NONE |
| K(ac)YEDICPSTHNMDVPNIK | EIF5A2 | NONE | NONE | NONE | NONE | NONE | NONE |
| (SEQ ID NO: 152) | | | | | | | |
| AHPVFYQGTYSQALNDAK(ac)R | FAF2 | NONE | NONE | NONE | NONE | NONE | NONE |
| (SEQ ID NO: 153) | | | | | | | |
| MPTPVIK(ac)AFGILK (SEQ ID NO: 154) | FH | NONE | NONE | NONE | NONE | NONE | NONE |
| SNFK(ac)TCEESSFCK (SEQ ID NO: 155) | GANAB | NONE | NONE | NONE | NONE | NONE | NONE |
| AVIWPQYVK(ac)DR (SEQ ID NO: 156) | GHITM | NONE | NONE | NONE | NONE | NONE | NONE |
| EAALEPSMEK(ac)IFK (SEQ ID NO: 157) | GHITM | − | + | + | NA | −0.54 | 0.52 |
| TAMK(ac)YNLGLDLR (SEQ ID NO: 158) | GLUD1 | NONE | NONE | NONE | NONE | NONE | NONE |
| NLDK(ac)EYLPIGGLAEFCK | GOT2 | NONE | NONE | NONE | NONE | NONE | NONE |
| (SEQ ID NO: 159) | | | | | | | |
| DSGNK(ac)PPGLLPR (SEQ ID NO: 160) | GSTK1 | NONE | NONE | NONE | NONE | NONE | NONE |
| GDASK(ac)EDIDTAMK (SEQ ID NO: 161) | HADH | NONE | NONE | NONE | NONE | NONE | NONE |
| GFGGK(ac)YGVER (SEQ ID NO: 162) | HCLS1 | + | − | − | 0.39 | 0.30 | 0.35 |
| YLENGK(ac)ETLQR (SEQ ID NO: 163) | HLA-H | NONE | NONE | NONE | NONE | NONE | NONE |
| K(ac)HPDASVNFSEFSK (SEQ ID NO: 164) | HMGB1P4 | NONE | NONE | NONE | NONE | NONE | NONE |
| GFAFVTFDDHDSVDK(ac)IVIQK | HNRNPA1 | NONE | NONE | NONE | NONE | NONE | NONE |
| (SEQ ID NO: 165) | | | | | | | |
| IFVGGLSPDTPEEK(ac)IR | HNRNPD | NONE | NONE | NONE | NONE | NONE | NONE |
| (SEQ ID NO: 166) | | | | | | | |
| ISK(ac)EVLAGR (SEQ ID NO: 167) | HNRNPU | NONE | NONE | NONE | NONE | NONE | NONE |
| VTEK(ac)IPVR (SEQ ID NO: 168) | HNRNPU | NONE | NONE | NONE | NONE | NONE | NONE |
| MKENQK(ac)HIYYITGETK | HSP90AA1 | NONE | NONE | NONE | NONE | NONE | NONE |
| (SEQ ID NO: 169) | | | | | | | |
| AFYK(ac)SFSK (SEQ ID NO: 170) | HSP90B1 | NONE | NONE | NONE | NONE | NONE | NONE |
| K(ac)TFEINPR (SEQ ID NO: 171) | HSP90B1 | NONE | NONE | NONE | NONE | NONE | NONE |
| AVEEK(ac)IEWLESHODADIEDFK | HSPA5 | NONE | NONE | NONE | NONE | NONE | NONE |
| (SEQ ID NO: 172) | | | | | | | |
| DVK(ac)FGADAR (SEQ ID NO: 173) | HSPD1 | NONE | NONE | NONE | NONE | NONE | NONE |
| IGIEIIK(ac)R (SEQ ID NO: 174) | HSPD1 | NONE | NONE | NONE | NONE | NONE | NONE |
| TLNDELEIIEGMK(ac)FDR | HSPD1 | NONE | NONE | NONE | NONE | NONE | NONE |
| (SEQ ID NO: 175) | | | | | | | |
| TPVIVTLK(ac)ENER (SEQ ID NO: 176) | HYOU1 | NONE | NONE | NONE | NONE | NONE | NONE |
| NTILK(ac)AYDGR (SEQ ID NO: 177) | IDH2 | NONE | NONE | NONE | NONE | NONE | NONE |
| HK(ac)DIDILIVR (SEQ ID NO: 178) | IDH3G | NONE | NONE | NONE | NONE | NONE | NONE |
| FEK(ac)EQQQLNWK (SEQ ID NO: 179) | ITGB7 | NONE | NONE | NONE | NONE | NONE | NONE |
| IGFGSFVDK(ac)TVLPFVSTVPSK | ITGB7 | NONE | NONE | NONE | NONE | NONE | NONE |
| (SEQ ID NO: 180) | | | | | | | |
| EVHK(ac)QVVESAYEVIK (SEQ ID NO: 181) | LDHA | NONE | NONE | NONE | NONE | NONE | NONE |
| DK(ac)TQYIFNNMVLK (SEQ ID NO: 182) | MAN2A1 | NONE | NONE | NONE | NONE | NONE | NONE |
| VALEIFQHSK(ac)YK (SEQ ID NO: 183) | MRPL39 | NONE | NONE | NONE | NONE | NONE | NONE |
| DELGDYLK(ac)PK (SEQ ID NO: 184) | MRPL46 | NONE | NONE | NONE | NONE | NONE | NONE |
| DAAGSGDK(ac)PGADTGR (SEQ ID NO: 185) | MRPL53 | NONE | NONE | NONE | NONE | NONE | NONE |
| VLK(ac)GNTAEGCVHETQEK | MYBBP1A | NONE | NONE | NONE | NONE | NONE | NONE |
| (SEQ ID NO: 186) | | | | | | | |
| FWNK(ac)FLENK (SEQ ID NO: 187) | NDUFB6 | − | − | + | NA | −0.10 | 0.58 |
| TYGEIFEK(ac)FHPIR (SEQ ID NO: 188) | NDUFC2 | NONE | NONE | NONE | NONE | NONE | NONE |
| PGGPALWGDAFK(ac)R (SEQ ID NO: 189) | NIPSNAP3A | NONE | NONE | NONE | NONE | NONE | NONE |
| QGFNVVVESGAGEASK(ac)FSDDHYR | NNT | NONE | NONE | NONE | NONE | NONE | NONE |
| (SEQ ID NO: 190) | | | | | | | |
| ADK(ac)DYHFK (SEQ ID NO: 191) | NPM1 | NONE | NONE | NONE | NONE | NONE | NONE |
| NYEHLFK(ac)VNDK (SEQ ID NO: 192) | PAM16 | NONE | NONE | NONE | NONE | NONE | NONE |
| VVVGK(ac)TFDSIVMDPK (SEQ ID NO: 193) | PDIA4 | NONE | NONE | NONE | NONE | NONE | NONE |
| NATVGQSVLNIK(ac)YK (SEQ ID NO: 194) | PEX2 | NONE | NONE | NONE | NONE | NONE | NONE |
| VLPSIVNEVLK(ac)SVVAK | PHB2 | NONE | NONE | NONE | NONE | NONE | NONE |
| (SEQ ID NO: 195) | | | | | | | |
| GDGTGGK(ac)SIYGER (SEQ ID NO: 196) | PPIB | NONE | NONE | NONE | NONE | NONE | NONE |
| GLFIIDDK(ac)GILR (SEQ ID NO: 197) | PRDX1 | NONE | NONE | NONE | NONE | NONE | NONE |
| KLPK(ac)NEPQNATGAPGR | RAB5C | NONE | NONE | NONE | NONE | NONE | NONE |
| (SEQ ID NO: 198) | | | | | | | |
| AGYNVK(ac)QLFR (SEQ ID NO: 199) | RAB6A | NONE | NONE | NONE | NONE | NONE | NONE |
| FLNAENAQK(ac)FK (SEQ ID NO: 200) | RANBP1 | NONE | NONE | NONE | NONE | NONE | NONE |
| NCMTDLLAK(ac)LEAK (SEQ ID NO: 201) | REEP5 | NONE | NONE | NONE | NONE | NONE | NONE |
| ADINTK(ac)WAATR (SEQ ID NO: 202) | RPL14 | NONE | NONE | NONE | NONE | NONE | NONE |
| RPAVK(ac)QFHDSK (SEQ ID NO: 203) | RPL18A | NONE | NONE | NONE | NONE | NONE | NONE |
| AYGGSMCAK(ac)CVR (SEQ ID NO: 204) | RPL34 | NONE | NONE | NONE | NONE | NONE | NONE |
| NVTLPAVFK(ac)APIRPDIVNFVHTNLR | RPL4 | NONE | NONE | NONE | NONE | NONE | NONE |
| (SEQ ID NO: 205) | | | | | | | |
| AGVNTVTTLVENK(ac)K (SEQ ID NO: 206) | RPL7A, | NONE | NONE | NONE | NONE | NONE | NONE |
| | SNORD24 | | | | | | |
| GIVK(ac)DIIHDPGR (SEQ ID NO: 207) | RPL8 | NONE | NONE | NONE | NONE | NONE | NONE |
| GHLENNPALEK(ac)LLPHIR | RPLP0 | NONE | NONE | NONE | NONE | NONE | NONE |
| (SEQ ID NO: 208) | | | | | | | |
| FFTVK(ac)LPVALDPGAK (SEQ ID NO: 209) | RPN1 | NONE | NONE | NONE | NONE | NONE | NONE |
| NVESYTK(ac)LGNPTR (SEQ ID NO: 210) | RPN1 | NONE | NONE | NONE | NONE | NONE | NONE |
| DLEK(ac)WQNNLLPSR (SEQ ID NO: 211) | RPS15A | NONE | NONE | NONE | NONE | NONE | NONE |
| IQDK(ac)EGIPPDQQR (SEQ ID NO: 212) | RPS27A | NONE | NONE | NONE | NONE | NONE | NONE |
| LIYDTK(ac)GR (SEQ ID NO: 213) | RPS4X | NONE | NONE | NONE | NONE | NONE | NONE |
| NKEEAAEYAK(ac)LLAK (SEQ ID NO: 214) | RPS6 | NONE | NONE | NONE | NONE | NONE | NONE |
| LIK(ac)VHLDK (SEQ ID NO: 215) | RPS7 | NONE | NONE | NONE | NONE | NONE | NONE |
| GYLTK(ac)EDLR (SEQ ID NO: 216) | S100A10 | NONE | NONE | NONE | NONE | NONE | NONE |
| IMK(ac)DLDQCR (SEQ ID NO: 217) | S100A10 | NONE | NONE | NONE | NONE | NONE | NONE |
| FLTK(ac)GDNNAVDDR (SEQ ID NO: 218) | SEC11B | NONE | NONE | NONE | NONE | NONE | NONE |
| FLEVIKPFCVILPEIQK(ac)PER | SEC61A1 | NONE | NONE | NONE | NONE | NONE | NONE |
| (SEQ ID NO: 219) | | | | | | | |
| GLSSLLYGSIPK(ac)AAVR | SLC25A1 | NONE | NONE | NONE | NONE | NONE | NONE |
| (SEQ ID NO: 220) | | | | | | | |
| LTEAKPVDK(ac)VK (SEQ ID NO: 221) | SLC25A10 | NONE | NONE | NONE | NONE | NONE | NONE |
| SLEK(ac)VCADLIR (SEQ ID NO: 222) | SNORD54, | NONE | NONE | NONE | NONE | NONE | NONE |
| | RPS20 | | | | | | |
| EVQINDLK(ac)EVVNK (SEQ ID NO: 223) | SNORD73A, | NONE | NONE | NONE | NONE | NONE | NONE |
| | RPS3A | | | | | | |
| (ac)SIGVPIK(ac)VLHEAEGHIVTCETNTGEVYR | SNRPD3 | NONE | NONE | NONE | NONE | NONE | NONE |
| (SEQ ID NO: 224) | | | | | | | |
| AVK(ac)HAEELER (SEQ ID NO: 225) | SRP68 | NONE | NONE | NONE | NONE | NONE | NONE |
| LSLDK(ac)VFR (SEQ ID NO: 226) | STOML2 | NONE | NONE | NONE | NONE | NONE | NONE |
| HIK(ac)ENDYYTPTGEFR (SEQ ID NO: 227) | STT3A | NONE | NONE | NONE | NONE | NONE | NONE |
| IGGSTDTGK(ac)HIK (SEQ ID NO: 228) | STT3A | NONE | NONE | NONE | NONE | NONE | NONE |
| LFVGSIPK(ac)SK (SEQ ID NO: 229) | SYNCRIP | NONE | NONE | NONE | NONE | NONE | NONE |
| HYEVEILDAK(ac)TR (SEQ ID NO: 230) | TECR | NONE | NONE | NONE | NONE | NONE | NONE |
| NAVQALIDK(ac)HQR (SEQ ID NO: 231) | TMEM68 | NONE | NONE | NONE | NONE | NONE | NONE |
| HVFTTFYAK(ac)TK (SEQ ID NO: 232) | TMEM70 | NONE | NONE | NONE | NONE | NONE | NONE |
| SFEEK(ac)VENLK (SEQ ID NO: 233) | TPD52 | NONE | NONE | NONE | NONE | NONE | NONE |
| SDCK(ac)EFSSEAR (SEQ ID NO: 234) | TRAP1 | NONE | NONE | NONE | NONE | NONE | NONE |
| SVQK(ac)LLDAVDTYIPVPAR | TUFM | NONE | NONE | NONE | NONE | NONE | NONE |
| (SEQ ID NO: 235) | | | | | | | |
| IGK(ac)VDCTQHYELCSGNQVR | TXNDC5, | NONE | NONE | NONE | NONE | NONE | NONE |
| (SEQ ID NO: 236) | MUTED, | | | | | | |
| | MUTED- | | | | | | |
| | TXNDC5 | | | | | | |
| NK(ac)TEDLEATSEHFK (SEQ ID NO: 237) | VAMP8 | NONE | NONE | NONE | NONE | NONE | NONE |
| FLK(ac)FGMTPSK (SEQ ID NO: 238) | VCP | NONE | NONE | NONE | NONE | NONE | NONE |
| DIFNK(ac)GFGFGLVK (SEQ ID NO: 239) | VDAC2 | NONE | NONE | NONE | NONE | NONE | NONE |
| GFGFGLVK(ac)LDVK (SEQ ID NO: 240) | VDAC2 | NONE | NONE | NONE | NONE | NONE | NONE |
| FLEQQNK(ac)ILLAELEQLK | VIM | NONE | NONE | NONE | NONE | NONE | NONE |
| (SEQ ID NO: 241) | | | | | | | |
| KVESLQEEIAFLK(ac)K (SEQ ID NO: 242) | VIM | NONE | NONE | NONE | NONE | NONE | NONE |
| FPTAIFESK(ac)GFR (SEQ ID NO: 243) | WHSC1L1 | NONE | NONE | NONE | NONE | NONE | NONE |
| LHTGEK(ac)PYK (SEQ ID NO: 244) | ZSCAN21 | NONE | NONE | NONE | NONE | NONE | NONE |
| KTPCGEGSK(ac)TWDR (SEQ ID NO: 245) | SNORD54, | NONE | NONE | NONE | NONE | NONE | NONE |
| | RPS20 | | | | | | |
| K(ac)YSQFINFPIYVWSSK | HSP90B1 | + | − | − | −0.43 | 0.32 | NA |
| (SEQ ID NO: 246) | | | | | | | |
| PLISVYSEK(ac)GESSGK (SEQ ID NO: 247) | RPL4 | NONE | NONE | NONE | NONE | NONE | NONE |
| ALDLNLK(ac)HQILPK (SEQ ID NO: 248) | UQCRB | NONE | NONE | NONE | NONE | NONE | NONE |
| IGQGYLIK(ac)DGK (SEQ ID NO: 249) | SNORD43, | NONE | NONE | NONE | NONE | NONE | NONE |
| | RPL3 | | | | | | |
| VGIVGK(ac)YGTR (SEQ ID NO: 250) | RPL37A | NONE | NONE | NONE | NONE | NONE | NONE |
| LYATMEK(ac)HK (SEQ ID NO: 251) | EP300 | NONE | NONE | NONE | NONE | NONE | NONE |
| TLQYK(ac)LLEPVLLLGK (SEQ ID NO: 252) | RPS16 | NONE | NONE | NONE | NONE | NONE | NONE |
| FPHSAHQK(ac)YVR (SEQ ID NO: 253) | RPL14 | NONE | NONE | NONE | NONE | NONE | NONE |
| YNCDK(ac)MICR (SEQ ID NO: 254) | UBA52 | NONE | NONE | NONE | NONE | NONE | NONE |
| SK(ac)SDPIMLLK (SEQ ID NO: 255) | PDHA1 | NONE | NONE | NONE | NONE | NONE | NONE |
| NICSK(ac)YSVR (SEQ ID NO: 256) | TXNDC5, | NONE | NONE | NONE | NONE | NONE | NONE |
| | MUTED, | | | | | | |
| | MUTED- | | | | | | |
| | TXNDC5 | | | | | | |
| NVLINK(ac)DIR (SEQ ID NO: 257) | CALR | NONE | NONE | NONE | NONE | NONE | NONE |
| YQQFK(ac)DFQR (SEQ ID NO: 258) | SNORD84, | NONE | NONE | NONE | NONE | NONE | NONE |
| | DDX39B | | | | | | |
| IPK(ac)HLTDAYFK (SEQ ID NO: 259) | RPL6 | NONE | NONE | NONE | NONE | NONE | NONE |
| AGLQVYNK(ac)CWK (SEQ ID NO: 260) | CD59 | NONE | NONE | NONE | NONE | NONE | NONE |
| EVEEDEYK(ac)AFYK (SEQ ID NO: 261) | HSP90B1 | NONE | NONE | NONE | NONE | NONE | NONE |
| AVLK(ac)FAAATGATPIAGR | SNORA6, | NONE | NONE | NONE | NONE | NONE | NONE |
| (SEQ ID NO: 262) | RPSAP15, | | | | | | |
| | SNORA62, | | | | | | |
| | RPSA | | | | | | |
| FVVEK(ac)AEQQK (SEQ ID NO: 263) | PHB | NONE | NONE | NONE | NONE | NONE | NONE |
| IQEVLK(ac)HAR (SEQ ID NO: 264) | MRPL20 | + | − | − | −0.65 | −0.09 | NA |
| GSK(ac)FYGPAGPYGIFAGR | PGRMC2 | NONE | NONE | NONE | NONE | NONE | NONE |
| (SEQ ID NO: 265) | | | | | | | |
| AK(ac)FEELNMDLFR (SEQ ID NO: 266) | HSPA5 | NONE | NONE | NONE | NONE | NONE | NONE |
| NQVALNPQNTVFDAK(ac)R | HSPA1B, | NONE | NONE | NONE | NONE | NONE | NONE |
| (SEQ ID NO: 267) | HSPA1A | | | | | | |
| DGLQNEK(ac)NIVSTPVK (SEQ ID NO: 268) | HMGCL | NONE | NONE | NONE | NONE | NONE | NONE |
| TLLIK(ac)TVETR (SEQ ID NO: 269) | VIM | NONE | NONE | NONE | NONE | NONE | NONE |
| TKYEK(ac)SLYSMIK (SEQ ID NO: 270) | ANXA6 | NONE | NONE | NONE | NONE | NONE | NONE |
| QNK(ac)LEQVEK (SEQ ID NO: 271) | ATP5O | NONE | NONE | NONE | NONE | NONE | NONE |
| ATVPK(ac)TEIR (SEQ ID NO: 272) | RPS24 | NONE | NONE | NONE | NONE | NONE | NONE |
| VHVIFNYK(ac)GK (SEQ ID NO: 273) | CALR | NONE | NONE | NONE | NONE | NONE | NONE |
| YDGK(ac)WEVEEMK (SEQ ID NO: 274) | CANX | NONE | NONE | NONE | NONE | NONE | NONE |
| RMELK(ac)ADQLYK (SEQ ID NO: 275) | PDHA2 | NONE | NONE | NONE | NONE | NONE | NONE |
| VMEHFIK(ac)LYK (SEQ ID NO: 276) | HSPA5 | NONE | NONE | NONE | NONE | NONE | NONE |
| (ac)AAK(ac)VFESIGK (SEQ ID NO: 277) | PHB | NONE | NONE | NONE | NONE | NONE | NONE |
| GWLK(ac)SNVSDAVACISTR | TPI1, | NONE | NONE | NONE | NONE | NONE | NONE |
| (SEQ ID NO: 278) | TPI1P1 | | | | | | |
| IVNSAQTGSFK(ac)QLTVK | ATP5L | NONE | NONE | NONE | NONE | NONE | NONE |
| (SEQ ID NO: 279) | | | | | | | |
| IFK(ac)SDGLR (SEQ ID NO: 280) | SLC25A4 | NONE | NONE | NONE | NONE | NONE | NONE |
| FVLSSGK(ac)FYGDEEKDK | CALR | NONE | NONE | NONE | NONE | NONE | NONE |
| (SEQ ID NO: 281) | | | | | | | |
| AINEAYK(ac)EDYHK (SEQ ID NO: 282) | ANXA6 | NONE | NONE | NONE | NONE | NONE | NONE |
| (ac)AEYLASIFGTEK(ac)DK | U2AF1 | NONE | NONE | NONE | NONE | NONE | NONE |
| (SEQ ID NO: 283) | | | | | | | |
| AISPDK(ac)DNFYFDVK (SEQ ID NO: 284) | NNT | NONE | NONE | NONE | NONE | NONE | NONE |
| NDTSGEYK(ac)K (SEQ ID NO: 285) | ANXA6 | NONE | NONE | NONE | NONE | NONE | NONE |
| NFEDVAFDEK(ac)K (SEQ ID NO: 286) | P4HB | NONE | NONE | NONE | NONE | NONE | NONE |
| FK(ac)LITEDVQGK (SEQ ID NO: 287) | SNORD73A, | NONE | NONE | NONE | NONE | NONE | NONE |
| | RPS3A | | | | | | |
| EIFQNEK(ac)R (SEQ ID NO: 288) | NNT | NONE | NONE | NONE | NONE | NONE | NONE |
| TCDLVGEK(ac)GK (SEQ ID NO: 289) | M6PR | NONE | NONE | NONE | NONE | NONE | NONE |
| VPVPEDK(ac)YTAQVDAEEKEDVK | ATP5H | − | − | + | 0.14 | 0.30 | 0.58 |
| (SEQ ID NO: 290) | | | | | | | |
| ILMSK(ac)PVLSGGTGR (SEQ ID NO: 291) | ZMYND8 | NONE | NONE | NONE | NONE | NONE | NONE |
| SAYFAEK(ac)LYK (SEQ ID NO: 292) | ANXA4 | NONE | NONE | NONE | NONE | NONE | NONE |
| YFLDK(ac)TLTSR (SEQ ID NO: 293) | BCKDK | NONE | NONE | NONE | NONE | NONE | NONE |
| VLSK(ac)EFHLNESGDPSSK | SET | NONE | NONE | NONE | NONE | NONE | NONE |
| (SEQ ID NO: 294) | | | | | | | |
| SEVDMLK(ac)IR (SEQ ID NO: 295) | ANXA2P2 | NONE | NONE | NONE | NONE | NONE | NONE |
| LVAENK(ac)FGK (SEQ ID NO: 296) | HADH | NONE | NONE | NONE | NONE | NONE | NONE |
| THILLFLPK(ac)SVSDYDGK | P4HB | NONE | NONE | NONE | NONE | NONE | NONE |
| (SEQ ID NO: 297) | | | | | | | |
| NKPLFFADK(ac)LYK (SEQ ID NO: 298) | ANXA6 | − | − | + | 0.00 | 0.00 | −0.41 |
| ISK(ac)EEAMR (SEQ ID NO: 299) | RPL11 | NONE | NONE | NONE | NONE | NONE | NONE |
| AIFAGYK(ac)R (SEQ ID NO: 300) | RPL35A | NONE | NONE | NONE | NONE | NONE | NONE |
| AGLVDDFEK(ac)K (SEQ ID NO: 301) | ATP5H | NONE | NONE | NONE | NONE | NONE | NONE |
| LLEQYK(ac)EESK (SEQ ID NO: 302) | HNRNPU | NONE | NONE | NONE | NONE | NONE | NONE |
| VLVGK(ac)NFEDVAFDEK (SEQ ID NO: 303) | P4HB | NONE | NONE | NONE | NONE | NONE | NONE |
| LEMSYSK(ac)FK (SEQ ID NO: 304) | DPAGT1 | NONE | NONE | NONE | NONE | NONE | NONE |
| PAQGAK(ac)YR (SEQ ID NO: 305) | ANXA6 | NONE | NONE | NONE | NONE | NONE | NONE |
| IFGSNK(ac)WTTEQQQR (SEQ ID NO: 306) | ARL6IP1 | NONE | NONE | NONE | NONE | NONE | NONE |
| HVVQSISTQQEK(ac)ETIAK | ATP5F1 | NONE | NONE | NONE | NONE | NONE | NONE |
| (SEQ ID NO: 307) | | | | | | | |
| VPGK(ac)DTVTK (SEQ ID NO: 308) | HADHB | NONE | NONE | NONE | NONE | NONE | NONE |
| PEPAK(ac)SAPAPK(ac)K | HIST2H2BE | + | − | − | 0.56 | NA | 0.32 |
| (SEQ ID NO: 309) | | | | | | | |
| K(ac)STGGK(ac)APR (SEQ ID NO: 310) | HIST2H3D, | NONE | NONE | NONE | NONE | NONE | NONE |
| | HIST2H3A, | | | | | | |
| | HIST2H3C | | | | | | |
| GK(ac)GGK(ac)GLGK (SEQ ID NO: 311) | HIST2H4B, | NONE | NONE | NONE | NONE | NONE | NONE |
| | HIST1H4C, | | | | | | |
| | HIST1H4J, | | | | | | |
| | HIST1H4D, | | | | | | |
| | HIST1H4A, | | | | | | |
| | HIST2H4A, | | | | | | |
| | HIST1H4I, | | | | | | |
| | HIST1H4K, | | | | | | |
| | HIST1H4E, | | | | | | |
| | HIST1H4L, | | | | | | |
| | HIST1H4F, | | | | | | |
| | HIST1H4H, | | | | | | |
| | HIST4H4, | | | | | | |
| | HIST1H4B | | | | | | |
| GLGK(ac)GGAK(ac)R (SEQ ID NO: 312) | HIST2H4B, | − | − | + | 0.19 | 0.09 | 0.69 |
| | HIST1H4C, | | | | | | |
| | HIST1H4J, | | | | | | |
| | HIST1H4D, | | | | | | |
| | HIST1H4A, | | | | | | |
| | HIST2H4A, | | | | | | |
| | HIST1H4I, | | | | | | |
| | HIST1H4K, | | | | | | |
| | HIST1H4E, | | | | | | |
| | HIST1H4L, | | | | | | |
| | HIST1H4F, | | | | | | |
| | HIST1H4H, | | | | | | |
| | HIST4H4, | | | | | | |
| | HIST1H4B | | | | | | |
| GLGK(ac)GGAKR (SEQ ID NO: 313) | HIST2H4B, | NONE | NONE | NONE | NONE | NONE | NONE |
| | HIST1H4C, | | | | | | |
| | HIST1H4J, | | | | | | |
| | HIST1H4D, | | | | | | |
| | HIST1H4A, | | | | | | |
| | HIST2H4A, | | | | | | |
| | HIST1H4I, | | | | | | |
| | HIST1H4K, | | | | | | |
| | HIST1H4E, | | | | | | |
| | HIST1H4L, | | | | | | |
| | HIST1H4F, | | | | | | |
| | HIST1H4H, | | | | | | |
| | HIST4H4, | | | | | | |
| | HIST1H4B | | | | | | |
| EK(ac)NLLHVTDTGVGMTR | HSP90B1 | + | − | − | 0.40 | −0.28 | NA |
| (SEQ ID NO: 314) | | | | | | | |
| KSDYIK(ac)LYVR (SEQ ID NO: 315) | HSP90B1 | NONE | NONE | NONE | NONE | NONE | NONE |
| K(ac)SADTLWGIQK (SEQ ID NO: 316) | LDHA | − | − | + | 0.05 | 0.04 | 2.19 |
| IVADK(ac)DYSVTANSK (SEQ ID NO: 317) | LDHB | NONE | NONE | NONE | NONE | NONE | NONE |
| VVDSMDALDK(ac)VVQER (SEQ ID NO: 318) | MRPL47 | NONE | NONE | NONE | NONE | NONE | NONE |
| YSAK(ac)DYFFK (SEQ ID NO: 319) | NAPA | NONE | NONE | NONE | NONE | NONE | NONE |
| GIVLEK(ac)VGVEAK (SEQ ID NO: 320) | RPS23 | NONE | NONE | NONE | NONE | NONE | NONE |
| DLQQYQSQAK(ac)QLFR (SEQ ID NO: 321) | SEC22B | NONE | NONE | NONE | NONE | NONE | NONE |
| LLASK(ac)SLLNR (SEQ ID NO: 322) | SSR2 | NONE | NONE | NONE | NONE | NONE | NONE |
| TMSCSDK(ac)ILR (SEQ ID NO: 323) | ADAR | − | + | − | NA | −0.87 | NA |
| MVAAAK(ac)YAR (SEQ ID NO: 324) | ATP5C1 | + | + | − | −0.89 | −0.71 | NA |
| FEDPK(ac)FEVIEKPQA (SEQ ID NO: 325) | ATP5J | + | − | − | −0.61 | −0.02 | NA |
| VQDGLSDIAEK(ac)FLK (SEQ ID NO: 326) | ATRX | − | − | + | NA | NA | 0.89 |
| LNK(ac)PFLFDTK (SEQ ID NO: 327) | CANX | − | + | − | NA | 0.43 | NA |
| AAEEVEAK(ac)FK (SEQ ID NO: 328) | CHCHD3 | − | + | − | NA | −0.53 | −0.08 |
| SLLK(ac)PFCAALLK (SEQ ID NO: 329) | CKAP5 | − | − | + | NA | NA | 0.48 |
| SMSTEGLMK(ac)FVDSK (SEQ ID NO: 330) | CS | − | + | − | NA | 0.76 | NA |
| YNIEK(ac)DIAAYIK (SEQ ID NO: 331) | DYNLL2 | − | + | − | NA | −0.50 | 0.03 |
| YLAEK(ac)YEWDVAEAR (SEQ ID NO: 332) | EEF2 | + | + | − | −0.52 | −0.40 | −0.11 |
| FK(ac)ILDAVVAQEPLHR (SEQ ID NO: 333) | EFTUD2 | − | − | + | NA | NA | −0.99 |
| LEAMCFDGVK(ac)R (SEQ ID NO: 334) | EIF1AXP1 | + | − | − | −0.62 | −0.17 | NA |
| LMCK(ac)PIFSK (SEQ ID NO: 335) | EIF2S3 | + | + | + | 1.18 | 0.41 | 0.38 |
| SNPSEVVEFTTCPDK(ac)PGIPVKPSVK | FNDC3A | − | + | − | NA | 0.40 | NA |
| (SEQ ID NO: 336) | | | | | | | |
| EIAQEFK(ac)TDLR (SEQ ID NO: 337) | HIST2H3PS2 | − | − | + | NA | NA | −0.49 |
| APQCLGK(ac)FIEIAAR (SEQ ID NO: 338) | HNRNPU | + | + | + | 0.99 | 0.77 | 0.47 |
| MMVAGFK(ac)K (SEQ ID NO: 339) | HNRNPU | − | − | + | NA | NA | −0.40 |
| FEYK(ac)YSFK (SEQ ID NO: 340) | LMAN1 | − | + | − | NA | −0.52 | NA |
| IINEVSK(ac)PLAHHIPVEK | MANF | − | + | − | NA | −0.58 | NA |
| (SEQ ID NO: 341) | | | | | | | |
| FLNK(ac)LAEER (SEQ ID NO: 342) | MATR3, | − | + | − | NA | −0.44 | NA |
| | SNHG4 | | | | | | |
| VHLSQK(ac)YK (SEQ ID NO: 343) | MATR3, | − | − | + | NA | NA | 0.40 |
| | SNHG4 | | | | | | |
| INK(ac)ALDK (SEQ ID NO: 344) | MYH9 | NONE | NONE | NONE | NONE | NONE | NONE |
| FCLSK(ac)PGVYK (SEQ ID NO: 345) | NOMO3, | NONE | NONE | NONE | NONE | NONE | NONE |
| | NOMO1 | | | | | | |
| AQNDLIWNIK(ac)DELKK (SEQ ID NO: 346) | PARP1 | − | − | + | NA | NA | 0.83 |
| FPDENFK(ac)LK (SEQ ID NO: 347) | PPIC | − | − | + | NA | NA | −1.15 |
| TNVPVK(ac)LFAR (SEQ ID NO: 348) | RALY | − | − | + | NA | NA | 0.39 |
| GYAYVEFENPDEAEK(ac)ALK | RNPS1 | − | + | + | NA | −0.38 | −0.54 |
| (SEQ ID NO: 349) | | | | | | | |
| VTNLLMLK(ac)GK (SEQ ID NO: 350) | ROD1 | − | − | + | NA | NA | 0.83 |
| KIEISQHAK(ac)YTCSFCGK | RPL37A | − | + | − | 0.24 | 1.97 | 0.32 |
| (SEQ ID NO: 351) | | | | | | | |
| DTYIENEK(ac)LISGK (SEQ ID NO: 352) | RPN1 | − | + | − | NA | 0.77 | NA |
| KDVHMPK(ac)HPELADK (SEQ ID NO: 353) | RPS10 | − | + | − | NA | 0.56 | NA |
| TFEK(ac)SMMNLQTK (SEQ ID NO: 354) | TOP1 | − | − | + | NA | NA | 0.46 |
| KQELLEALTK(ac)HFQD (SEQ ID NO: 355) | XRCC6 | − | + | − | NA | −1.25 | −0.23 |
| NFK(ac)SISK (SEQ ID NO: 356) | ACADVL | − | + | − | 0.29 | 0.59 | NA |
| TNFSNEK(ac)TISK (SEQ ID NO: 357) | ACYP2 | − | + | − | NA | 0.84 | NA |
| K(ac)YGKSLYYYIQQDTK (SEQ ID NO: 358) | ANXA2P2 | − | + | − | NA | 0.66 | NA |
| RPEILK(ac)QEIK (SEQ ID NO: 359) | AP2B1 | − | + | − | NA | 0.57 | NA |
| ELQEMDKDDESLIK(ac)YK | ARHGDIB | − | + | − | NA | 0.41 | NA |
| (SEQ ID NO: 360) | | | | | | | |
| NAYVWILK(ac)GR (SEQ ID NO: 361) | ARPC1B, | NONE | NONE | NONE | NONE | NONE | NONE |
| | ARPC1A | | | | | | |
| VFDPQNDK(ac)PSKWWTCFVK | ARPC3 | − | + | − | 0.32 | 0.45 | NA |
| (SEQ ID NO: 362) | | | | | | | |
| VLISFK(ac)ANDIEK (SEQ ID NO: 363) | ARPC5 | − | + | − | NA | 0.42 | NA |
| LAALPENPPAIDWAYYK(ac)ANVAK | ATP5H | − | + | − | NA | 0.48 | NA |
| (SEQ ID NO: 364) | | | | | | | |
| ELDPIQK(ac)LFVDK (SEQ ID NO: 365) | ATP5J | − | + | − | NA | −0.48 | NA |
| GHCPPAPAK(ac)PMHPENK(ac)LTNHGK | BCL9L | + | − | − | 0.63 | NA | NA |
| (SEQ ID NO: 366) | | | | | | | |
| LVGELK(ac)LDR (SEQ ID NO: 367) | BPI | − | + | − | NA | −0.52 | NA |
| SNYK(ac)MMFVK (SEQ ID NO: 368) | C11orf58 | + | − | − | −0.45 | NA | NA |
| K(ac)HDSGAADLER (SEQ ID NO: 369) | C15orf63 | + | + | − | 2.73 | 2.66 | NA |
| AELSK(ac)LVIVAK (SEQ ID NO: 370) | C19orf10 | − | + | − | NA | 1.55 | NA |
| LHSNYYK(ac)HK (SEQ ID NO: 371) | C6orf125 | + | − | − | 0.52 | NA | NA |
| GQTLVVQFTVK(ac)HEQNIDCGGGYVK | CALR | − | + | − | NA | −0.43 | NA |
| (SEQ ID NO: 372) | | | | | | | |
| K(ac)VCGDSDKGFVVINQK | CCT6A | + | − | − | 0.67 | NA | NA |
| (SEQ ID NO: 373) | | | | | | | |
| (ac)MEDYTK(ac)IEK (SEQ ID NO: 374) | CDK1 | + | + | − | −0.51 | −0.40 | NA |
| LK(ac)ADVFK (SEQ ID NO: 375) | CHD4 | − | − | + | NA | NA | −0.45 |
| (ac)SNMEK(ac)HLFNLK (SEQ ID NO: 376) | CHMP1B | NONE | NONE | NONE | NONE | NONE | NONE |
| GK(ac)YMLVR (SEQ ID NO: 377) | CHST1 | + | − | − | 3.73 | NA | NA |
| FLDGNEMTLADCNLLPK(ac)LHIVK | CLIC4 | − | + | − | NA | 0.51 | NA |
| (SEQ ID NO: 378) | | | | | | | |
| (ac)SSNECFK(ac)CGR (SEQ ID NO: 379) | CNBP | + | − | − | −1.09 | NA | NA |
| NLK(ac)NEITK (SEQ ID NO: 380) | COPA | − | + | − | NA | 0.40 | NA |
| DHPLPEVAHVK(ac)HLSASQK | COX4I1 | − | + | − | NA | −0.63 | NA |
| (SEQ ID NO: 381) | | | | | | | |
| NLPFSVENK(ac)WSLLAK (SEQ ID NO: 382) | COX7C | − | + | − | NA | −0.87 | NA |
| GLESTTLADK(ac)DGEIYCK | CSRP1 | + | − | − | −0.67 | NA | NA |
| (SEQ ID NO: 383) | | | | | | | |
| HTENVAK(ac)FHCPHCDTVIAR | CTCF | − | − | + | NA | NA | −0.66 |
| (SEQ ID NO: 384) | | | | | | | |
| LHYK(ac)HESWLLHR (SEQ ID NO: 385) | DCK | − | + | − | NA | −0.43 | NA |
| QLNDVK(ac)TTVVYPATEK | DCPS | NONE | NONE | NONE | NONE | NONE | NONE |
| (SEQ ID NO: 386) | | | | | | | |
| SHSAHFFEFLTK(ac)ELALGQDR | DDT | − | + | − | NA | −0.44 | NA |
| (SEQ ID NO: 387) | | | | | | | |
| KDFIK(ac)TTVK (SEQ ID NO: 388) | DEK | − | − | + | NA | NA | 0.38 |
| LCMLYHPDK(ac)HRDPELK | DNAJC11 | − | + | − | NA | −0.69 | NA |
| (SEQ ID NO: 389) | | | | | | | |
| LCK(ac)YIYAK (SEQ ID NO: 390) | EIF3C, | − | + | − | NA | 0.45 | NA |
| | EIF3CL | | | | | | |
| KPEENPASK(ac)FSSASK (SEQ ID NO: 391) | EIF4B | + | − | − | 0.53 | NA | NA |
| EENTSNESTDVTK(ac)GDSK(ac)NAK | EP300 | + | + | − | 0.53 | 0.39 | NA |
| (SEQ ID NO: 392) | | | | | | | |
| GLAPQNK(ac)PELQK (SEQ ID NO: 393) | FAM107B | + | − | − | 0.69 | NA | NA |
| VYISK(ac)CYR (SEQ ID NO: 394) | FAM82A2 | − | + | − | NA | −0.85 | NA |
| SFYYK(ac)LR (SEQ ID NO: 395) | FASN | − | − | + | NA | NA | −0.73 |
| AVSMDNSNK(ac)YTK (SEQ ID NO: 396) | FOXO3 | + | − | − | 0.45 | NA | NA |
| FAFK(ac)EVEVQAK (SEQ ID NO: 397) | FTSJ3 | − | − | + | NA | NA | 0.74 |
| LVQTAELTK(ac)VFEIR (SEQ ID NO: 398) | GMFG | − | + | − | NA | −0.80 | NA |
| LWNTLGVCK(ac)YTVQDESHSEWVSCVR | GNB2L1 | − | + | + | NA | 0.60 | 0.47 |
| (SEQ ID NO: 399) | | | | | | | |
| EFTK(ac)LEEVLTNK (SEQ ID NO: 400) | GSTO1 | + | − | − | −0.60 | NA | NA |
| VIIVVK(ac)DGPGFYTTR (SEQ ID NO: 401) | HADHA | − | + | − | NA | −0.70 | NA |
| AK(ac)FESMAEEK (SEQ ID NO: 402) | HCLS1 | + | + | − | 1.21 | 0.41 | NA |
| ATAEEMTK(ac)YHSDEYIK | HDAC2 | NONE | NONE | NONE | NONE | NONE | NONE |
| (SEQ ID NO: 403) | | | | | | | |
| ESESVDK(ac)VMDQK (SEQ ID NO: 404) | HNRNPD | − | − | + | NA | NA | −0.53 |
| VFITDDFHDMMPK(ac)YLNFVK | HSP90B1 | − | + | − | NA | 0.77 | NA |
| (SEQ ID NO: 405) | | | | | | | |
| IQEIIEQLDVTTSEYEK(ac)EKLNER | HSPD1 | + | − | − | 0.40 | NA | NA |
| (SEQ ID NO: 406) | | | | | | | |
| TFYQMYDK(ac)GLVYR (SEQ ID NO: 407) | IARS2 | + | − | − | −0.56 | NA | NA |
| NVTAIQGPGGK(ac)WMIPSEAK | IDH3A | + | − | − | −0.44 | NA | NA |
| (SEQ ID NO: 408) | | | | | | | |
| KSEDTISK(ac)MNDFMR (SEQ ID NO: 409) | IFI16 | − | − | + | NA | NA | −0.57 |
| SQSCETK(ac)LLDEK (SEQ ID NO: 410) | 1L16 | + | − | − | −0.53 | NA | NA |
| KK(ac)FLCVTK (SEQ ID NO: 411) | KBTBD8 | + | − | − | 2.55 | NA | NA |
| IQFK(ac)QDDGTGPEK (SEQ ID NO: 412) | KHSRP | − | + | − | NA | 0.61 | NA |
| K(ac)GPSVQKR (SEQ ID NO: 413) | LIN28B | + | + | − | 0.50 | 0.47 | NA |
| LK(ac)AEKYR (SEQ ID NO: 414) | LRRIQ3 | − | + | − | NA | −1.77 | NA |
| FQAK(ac)LEHEYIQNFK (SEQ ID NO: 415) | MAPRE1 | − | + | − | NA | −1.51 | NA |
| NVQQTVSAK(ac)GPPEK(ac)R | MED6 | + | − | − | 0.49 | NA | NA |
| (SEQ ID NO: 416) | | | | | | | |
| YK(ac)VEYPIMYSTDPENGHIFNCIQR | MGST3 | − | + | − | NA | −0.59 | NA |
| (SEQ ID NO: 417) | | | | | | | |
| TPSVGK(ac)AMDTPKPAGGDEK | MKI67 | − | − | + | NA | NA | −0.86 |
| (SEQ ID NO: 418) | | | | | | | |
| IIWHK(ac)FK (SEQ ID NO: 419) | MRPL47 | − | + | − | NA | −0.73 | NA |
| FK(ac)ECLDK (SEQ ID NO: 420) | NAA15 | − | + | − | NA | 0.60 | NA |
| (ac)AQLGK(ac)LLK (SEQ ID NO: 421) | NAE1 | NONE | NONE | NONE | NONE | NONE | NONE |
| SELEFK(ac)FNR (SEQ ID NO: 422) | NANS | + | − | − | 0.53 | NA | NA |
| YTEQITNEK(ac)LAMVK (SEQ ID NO: 423) | NDUFA5 | − | + | − | NA | −0.40 | NA |
| YHVSEK(ac)PYGIVEK (SEQ ID NO: 424) | NDUFB6 | − | + | − | NA | −1.08 | NA |
| CHAFEK(ac)EWIECAHGIGYTR | NDUFS5 | − | + | − | NA | −0.63 | NA |
| (SEQ ID NO: 425) | | | | | | | |
| DVTK(ac)AMDEK (SEQ ID NO: 426) | PFKM | − | − | + | NA | NA | 0.53 |
| EGVHGGLINK(ac)K (SEQ ID NO: 427) | PFN1 | + | − | − | 0.58 | NA | NA |
| TVSK(ac)VDDFLANEAK (SEQ ID NO: 428) | PGD | − | + | − | NA | 0.74 | NA |
| ITLPVDFVTADK(ac)FDENAK | PGK1 | − | + | − | NA | 0.60 | NA |
| (SEQ ID NO: 429) | | | | | | | |
| NVTGHYISPFHDIPLK(ac)VNSK | PPA2 | − | − | + | NA | NA | 0.91 |
| (SEQ ID NO: 430) | | | | | | | |
| FEDENFHYK(ac)HDR (SEQ ID NO: 431) | PPID | − | + | − | NA | 0.46 | NA |
| HSPEDPEK(ac)YSCFALFVK | PRKDC | − | − | + | NA | NA | −0.41 |
| (SEQ ID NO: 432) | | | | | | | |
| MLK(ac)QMLFR (SEQ ID NO: 433) | PSMB7 | − | + | − | NA | −0.46 | NA |
| IMK(ac)SEVLR (SEQ ID NO: 434) | PSMC3 | NONE | NONE | NONE | NONE | NONE | NONE |
| TTHLIAK(ac)EEMIHNLQ (SEQ ID NO: 435) | PSMD12 | + | − | − | −0.38 | NA | NA |
| VAHLALK(ac)HR (SEQ ID NO: 436) | PSMD4 | − | + | − | NA | −0.57 | NA |
| (ac)SDAAVDTSSEITTK(ac)DLK | PTMA, | + | + | − | 0.57 | 1.03 | NA |
| (SEQ ID NO: 437) | MIR1244-3, | | | | | | |
| | MIR1244-2, | | | | | | |
| | MIR1244-1 | | | | | | |
| HMVMQK(ac)LLR (SEQ ID NO: 438) | PUF60 | + | + | + | 0.71 | 0.89 | 0.54 |
| AFQLK(ac)SR (SEQ ID NO: 439) | RAVER1 | − | + | − | NA | −0.89 | NA |
| IMQK(ac)YGFR (SEQ ID NO: 440) | RBM17 | − | − | + | NA | NA | −0.50 |
| GNLYSFGCPEYGQLGHNSDGK(ac)FIAR | RCC2 | − | + | − | NA | 0.75 | NA |
| (SEQ ID NO: 441) | | | | | | | |
| WTPEVK(ac)HFCPNVPIILVGNK | RHOC | − | + | − | NA | −0.39 | NA |
| (SEQ ID NO: 442) | | | | | | | |
| AYHLQK(ac)STCGK (SEQ ID NO: 443) | RPL37 | NONE | NONE | NONE | NONE | NONE | NONE |
| NVYK(ac)FELDTSER (SEQ ID NO: 444) | RPN2 | − | + | − | NA | 0.54 | NA |
| VETFSGVYK(ac)K (SEQ ID NO: 445) | RPS7 | − | + | − | NA | −0.78 | NA |
| MLEK(ac)DVCEK (SEQ ID NO: 446) | RUFY3 | + | − | − | 0.62 | NA | NA |
| VEWAK(ac)FQER (SEQ ID NO: 447) | SF3A1 | − | − | + | NA | NA | −0.55 |
| LNPK(ac)TGLIDYNQLALTAR | SHMT2 | + | − | − | −0.41 | NA | NA |
| (SEQ ID NO: 448) | | | | | | | |
| GNTPK(ac)YGLIFHSTFIGR | SNORD110, | − | − | + | NA | NA | −0.41 |
| (SEQ ID NO: 449) | SNORD86, | | | | | | |
| | NOP56 | | | | | | |
| HHAAYVNNLNVTEEK(ac)YQEALAK | SOD2 | + | − | − | −0.67 | NA | NA |
| (SEQ ID NO: 450) | | | | | | | |
| TITCSK(ac)LAYYYQR (SEQ ID NO: 451) | SRP54 | − | − | + | NA | NA | 0.40 |
| DK(ac)WLCPLSGK (SEQ ID NO: 452) | SRRT | − | − | + | NA | NA | 0.42 |
| IIEDQQESLNK(ac)WK (SEQ ID NO: 453) | SSB | + | − | − | 0.57 | NA | NA |
| IDYGEYMDK(ac)NNVR (SEQ ID NO: 454) | SSBP1 | − | + | − | NA | −0.52 | NA |
| GEDFPANNIVK(ac)FLVGFTNK | SSR1 | − | + | − | NA | −0.88 | NA |
| (SEQ ID NO: 455) | | | | | | | |
| DK(ac)LAQQQAAAAAAAAAAASQQGSAK | TBL1XR1 | + | + | − | 0.89 | 0.73 | NA |
| (SEQ ID NO: 456) | | | | | | | |
| IAVEAQNK(ac)YER (SEQ ID NO: 457) | TPR | − | + | − | NA | 0.62 | NA |
| SQNTK(ac)ISTQLDFASK (SEQ ID NO: 458) | TPR | − | + | − | NA | −0.45 | NA |
| GK(ac)LEEQRPER (SEQ ID NO: 459) | TPT1 | − | + | − | NA | −0.42 | NA |
| QPAENVNQYLTDPK(ac)FVER | UBA1 | + | − | − | 0.44 | NA | NA |
| (SEQ ID NO: 460) | | | | | | | |
| YPPPYK(ac)HFWTAES (SEQ ID NO: 461) | UBAP2L | NONE | NONE | NONE | NONE | NONE | NONE |
| IYHPNVDK(ac)LGR (SEQ ID NO: 462) | UBE2N | − | + | − | NA | −0.70 | NA |
| ACK(ac)LAIR (SEQ ID NO: 463) | VCP | − | + | − | NA | −0.58 | NA |
| (ac)AVPPTYADLGK(ac)SAR | VDAC1 | − | + | − | NA | −0.78 | NA |
| (SEQ ID NO: 464) | | | | | | | |
| GYGFGLIK(ac)LDLK (SEQ ID NO: 465) | VDAC1 | − | + | − | NA | −0.57 | NA |
| LTLSALLDGK(ac)NVNAGGHK | VDAC1 | − | + | − | NA | −0.66 | NA |
| (SEQ ID NO: 466) | | | | | | | |
| DVFNK(ac)GYGFGMVK (SEQ ID NO: 467) | VDAC3 | − | + | − | NA | −0.73 | NA |
| FGIAAK(ac)YMLDCR (SEQ ID NO: 468) | VDAC3 | − | + | + | NA | −0.89 | 0.55 |
| LTLSALIDGK(ac)NFSAGGHK | VDAC3 | − | + | − | NA | −0.71 | NA |
| (SEQ ID NO: 469) | | | | | | | |
| SGK(ac)FMNPTDQAR (SEQ ID NO: 470) | WBP11 | + | + | − | −0.45 | −0.68 | NA |
| QLGSILK(ac)TNVR (SEQ ID NO: 471) | XPO1 | + | − | − | 0.93 | NA | NA |
| AIVEK(ac)LR (SEQ ID NO: 472) | XRCC6 | − | − | + | NA | NA | 1.89 |
| CPICEK(ac)VIQGAGK (SEQ ID NO: 473) | ZBTB7A | + | − | − | −0.44 | NA | NA |
| SIDFPLTK(ac)VYVVEGSK | ZMPSTE24 | − | + | − | NA | 0.61 | NA |
| (SEQ ID NO: 474) | | | | | | | |
| IIEK(ac)DVMEGVTVDDHMMK | ZNF326 | − | − | + | NA | NA | 0.40 |
| (SEQ ID NO: 475) | | | | | | | |
| LVSEK(ac)LASYQAAR (SEQ ID NO: 476) | MYC | + | + | − | −0.55 | −0.58 | −0.26 |
| SFDK(ac)NLYR (SEQ ID NO: 477) | MCM4 | − | + | − | NA | −0.57 | 0.26 |
| LVDTGDK(ac)FR (SEQ ID NO: 478) | SPTBN1 | − | + | − | −0.26 | −0.42 | −0.30 |
| FGIAAK(ac)YQLDPTASISAK | VDAC2 | − | + | − | NA | −0.74 | 0.35 |
| (SEQ ID NO: 479) | | | | | | | |
| IK(ac)EKYIDQEELNK (SEQ ID NO: 480) | HSP90AA1 | + | − | − | 0.45 | NA | NA |
| SYAEELAK(ac)HGMK (SEQ ID NO: 481) | HSD17B12 | + | + | − | 0.41 | 0.73 | NA |
| EHLLK(ac)YEYQPFAGK (SEQ ID NO: 482) | WDR1 | − | + | − | 0.33 | 0.45 | −0.13 |
| GVHPK(ac)FPEGGK (SEQ ID NO: 483) | CYB5R1 | − | + | − | NA | −0.48 | NA |
| LAK(ac)LSDGVAVLK (SEQ ID NO: 484) | HSPD1 | + | − | − | −0.57 | 0.00 | NA |
| LTLDK(ac)LDVK (SEQ ID NO: 485) | PGK1 | − | + | − | NA | −0.39 | NA |
| DVTLQK(ac)QCVPFR (SEQ ID NO: 486) | RPL17 | − | − | + | NA | NA | −0.38 |
| FVATGHGK(ac)YEK (SEQ ID NO: 487) | LOC100133284, | + | + | − | 1.24 | 1.02 | NA |
| | LSP1 | | | | | | |
| VAILK(ac)ANLR (SEQ ID NO: 488) | VCP | + | + | − | 2.84 | 1.09 | NA |
| IVQK(ac)HPHTGDTKEEK (SEQ ID NO: 489) | DAP | + | + | − | 0.91 | 0.80 | NA |
| GSK(ac)K(ac)AVIK (SEQ ID NO: 490) | HIST2H2BE | NONE | NONE | NONE | NONE | NONE | NONE |
| PKPYDPPGEK(ac)MVAAK (SEQ ID NO: 491) | ATF4 | NONE | NONE | NONE | NONE | NONE | NONE |
| RPPQTIK(ac)SVR (SEQ ID NO: 492) | C15orf58 | − | − | + | NA | NA | −5.00 |
| STPAITLESPDIK(ac)YPLR | CYB5R3 | NONE | NONE | NONE | NONE | NONE | NONE |
| (SEQ ID NO: 493) | | | | | | | |
| HGMK(ac)VVLISR (SEQ ID NO: 494) | HSD17B12 | NONE | NONE | NONE | NONE | NONE | NONE |
| LALQK(ac)QLTK (SEQ ID NO: 495) | ZNF385C | NONE | NONE | NONE | NONE | NONE | NONE |
| NK(ac)YGDAFIR (SEQ ID NO: 496) | LSM6 | NONE | NONE | NONE | NONE | NONE | NONE |
| AK(ac)HDELTYF (SEQ ID NO: 497) | CSTB | NONE | NONE | NONE | NONE | NONE | NONE |
| NK(ac)WFFQK (SEQ ID NO: 498) | RPL27 | NONE | NONE | NONE | NONE | NONE | NONE |
| LMK(ac)YGDSLYR (SEQ ID NO: 499) | GTPBP4 | NONE | NONE | NONE | NONE | NONE | NONE |
| LPSSTK(ac)SGWPR (SEQ ID NO: 500) | PHF15 | NONE | NONE | NONE | NONE | NONE | NONE |
| TLAMDVMK(ac)PR (SEQ ID NO: 501) | CLCN5 | NONE | NONE | NONE | NONE | NONE | NONE |
| SAQEAYK(ac)SYIR (SEQ ID NO: 502) | DDX18 | NONE | NONE | NONE | NONE | NONE | NONE |
| AEK(ac)DEPGAWEETFK (SEQ ID NO: 503) | GANAB | NONE | NONE | NONE | NONE | NONE | NONE |
| FSPDDK(ac)YSR (SEQ ID NO: 504) | NOP10 | NONE | NONE | NONE | NONE | NONE | NONE |
| LAAIVAK(ac)QVLLGR (SEQ ID NO: 505) | SNORD32A, | NONE | NONE | NONE | NONE | NONE | NONE |
| | RPL13A, | | | | | | |
| | SNORD33, | | | | | | |
| | SNORD34 | | | | | | |
| IDK(ac)PILK (SEQ ID NO: 506) | RPL8 | NONE | NONE | NONE | NONE | NONE | NONE |
| LVPLK(ac)ETIK (SEQ ID NO: 507) | ATP5B | NONE | NONE | NONE | NONE | NONE | NONE |
| (ac)AEPVSPLK(ac)HFVLAK | MFN1 | NONE | NONE | NONE | NONE | NONE | NONE |
| (SEQ ID NO: 508) | | | | | | | |
| EEAIK(ac)FSEEQR (SEQ ID NO: 509) | XRCC5 | NONE | NONE | NONE | NONE | NONE | NONE |
| K(ac)EELTLEGIR (SEQ ID NO: 510) | EIF4A1 | NONE | NONE | NONE | NONE | NONE | NONE |
| TLFVK(ac)GLSEDTTEETLK | NCL | NONE | NONE | NONE | NONE | NONE | NONE |
| (SEQ ID NO: 511) | | | | | | | |
| LIAGNK(ac)PVSFLTAQQLQQLQQQGQATQVR | NFRKB | NONE | NONE | NONE | NONE | NONE | NONE |
| (SEQ ID NO: 512) | | | | | | | |
| ALK(ac)YLVMDEADR (SEQ ID NO: 513) | DDX47 | NONE | NONE | NONE | NONE | NONE | NONE |
| LLLFK(ac)TFSR (SEQ ID NO: 514) | HNRNPUL2 | NONE | NONE | NONE | NONE | NONE | NONE |
| VLGTVK(ac)WFNVR (SEQ ID NO: 515) | CSDA | NONE | NONE | NONE | NONE | NONE | NONE |
| TLK(ac)ALEYVFK (SEQ ID NO: 516) | DOCK2 | NONE | NONE | NONE | NONE | NONE | NONE |
| LMEK(ac)EINGSK (SEQ ID NO: 517) | ATL3 | NONE | NONE | NONE | NONE | NONE | NONE |
| AVDCLLDSK(ac)WAK (SEQ ID NO: 518) | SEC62 | NONE | NONE | NONE | NONE | NONE | NONE |
| GHK(ac)FHHTIGGSR (SEQ ID NO: 519) | RPL15 | NONE | NONE | NONE | NONE | NONE | NONE |
| VYVLK(ac)FK (SEQ ID NO: 520) | ADRM1 | NONE | NONE | NONE | NONE | NONE | NONE |
| LSFISVGNK(ac)FK (SEQ ID NO: 521) | MYO6 | NONE | NONE | NONE | NONE | NONE | NONE |
| VITEEEK(ac)NFK (SEQ ID NO: 522) | RPL13 | NONE | NONE | NONE | NONE | NONE | NONE |
| TLVLSDK(ac)HSPQK (SEQ ID NO: 523) | MLL3 | NONE | NONE | NONE | NONE | NONE | NONE |
| SQFLK(ac)YIEK (SEQ ID NO: 524) | MCM2 | NONE | NONE | NONE | NONE | NONE | NONE |
| SEIINSK(ac)NFDR (SEQ ID NO: 525) | TMEM43 | NONE | NONE | NONE | NONE | NONE | NONE |
| MQK(ac)EITALAPSTMK (SEQ ID NO: 526) | ACTA2 | NONE | NONE | NONE | NONE | NONE | NONE |
| ETGYTYILPK(ac)NVLK (SEQ ID NO: 527) | PRPF8 | NONE | NONE | NONE | NONE | NONE | NONE |
| LLNK(ac)HGIK (SEQ ID NO: 528) | RSL1D1 | NONE | NONE | NONE | NONE | NONE | NONE |
| K(ac)VLFTCFK (SEQ ID NO: 529) | TOP2B | NONE | NONE | NONE | NONE | NONE | NONE |
| DMCLEK(ac)DTLGLFLR (SEQ ID NO: 530) | SNRNP200 | NONE | NONE | NONE | NONE | NONE | NONE |
| IAAYK(ac)SILQER (SEQ ID NO: 531) | XRCC5 | NONE | NONE | NONE | NONE | NONE | NONE |
| YAVLYQPLFDK(ac)R (SEQ ID NO: 532) | NAP1L1 | NONE | NONE | NONE | NONE | NONE | NONE |
| SHLAK(ac)EGLYQYK (SEQ ID NO: 533) | EIF3A | NONE | NONE | NONE | NONE | NONE | NONE |
| YKDAIHFYNK(ac)SLAEHR | STIP1 | NONE | NONE | NONE | NONE | NONE | NONE |
| (SEQ ID NO: 534) | | | | | | | |
| YIGK(ac)TMDYR (SEQ ID NO: 535) | MRPL24 | NONE | NONE | NONE | NONE | NONE | NONE |
| GLCEK(ac)PLASAAAK (SEQ ID NO: 536) | TNPO3 | NONE | NONE | NONE | NONE | NONE | NONE |
| GK(ac)FGNVYLAR (SEQ ID NO: 537) | AURKC | NONE | NONE | NONE | NONE | NONE | NONE |
| LWSK(ac)AIFAGYK (SEQ ID NO: 538) | RPL35A | NONE | NONE | NONE | NONE | NONE | NONE |
| LQVLDPVPK(ac)PVIK (SEQ ID NO: 539) | CD48 | NONE | NONE | NONE | NONE | NONE | NONE |
| ELK(ac)EIQYGIR (SEQ ID NO: 540) | BCAT2 | NONE | NONE | NONE | NONE | NONE | NONE |
| GYPTIK(ac)FFR (SEQ ID NO: 541) | P4HB | NONE | NONE | NONE | NONE | NONE | NONE |
| IHGVGFK(ac)K (SEQ ID NO: 542) | RPL31 | NONE | NONE | NONE | NONE | NONE | NONE |
| ISGASEK(ac)DIVHSGLAYTMER | GLUD1 | NONE | NONE | NONE | NONE | NONE | NONE |
| (SEQ ID NO: 543) | | | | | | | |
| PK(ac)PLLFK (SEQ ID NO: 544) | UGGT1 | NONE | NONE | NONE | NONE | NONE | NONE |
| FNNFLK(ac)ALQEK (SEQ ID NO: 545) | XRCC5 | NONE | NONE | NONE | NONE | NONE | NONE |
| AVDLIQK(ac)HK (SEQ ID NO: 546) | FEN1 | NONE | NONE | NONE | NONE | NONE | NONE |
| AEEILEK(ac)GLK (SEQ ID NO: 547) | RPL11 | NONE | NONE | NONE | NONE | NONE | NONE |
| LFDYFPK(ac)PYPNSEAAR | CYC1 | NONE | NONE | NONE | NONE | NONE | NONE |
| (SEQ ID NO: 548) | | | | | | | |
| AHLQK(ac)LMSDK (SEQ ID NO: 549) | GARS | NONE | NONE | NONE | NONE | NONE | NONE |
| TFK(ac)GVVDVVMK (SEQ ID NO: 550) | GFM2 | NONE | NONE | NONE | NONE | NONE | NONE |
| AAWEHMK(ac)K (SEQ ID NO: 551) | HSD17B4 | NONE | NONE | NONE | NONE | NONE | NONE |
| STVAQLVK(ac)R (SEQ ID NO: 552) | ATP5A1 | NONE | NONE | NONE | NONE | NONE | NONE |
| YNIEK(ac)DIAAHIK (SEQ ID NO: 553) | DYNLL1 | NONE | NONE | NONE | NONE | NONE | NONE |
| HFAFK(ac)MASGAANVVGPK | FAM3C | NONE | NONE | NONE | NONE | NONE | NONE |
| (SEQ ID NO: 554) | | | | | | | |
| TDFDKNK(ac)IWYEHR (SEQ ID NO: 555) | IDH2 | NONE | NONE | NONE | NONE | NONE | NONE |
| HGYIK(ac)GIVK (SEQ ID NO: 556) | RPL8 | NONE | NONE | NONE | NONE | NONE | NONE |
| FAK(ac)PVYPGQTLQTEMWK | HSD17B4 | NONE | NONE | NONE | NONE | NONE | NONE |
| (SEQ ID NO: 557) | | | | | | | |
| NCSSFLIK(ac)R (SEQ ID NO: 558) | RPL28 | − | − | + | 0.05 | −0.15 | −0.40 |
| NK(ac)IAGYVTHLMK (SEQ ID NO: 559) | RPS17, | NONE | NONE | NONE | NONE | NONE | NONE |
| | RPS17L | | | | | | |
| AVTK(ac)AQK(ac)K (SEQ ID NO: 560) | HIST2H2BE | NONE | NONE | NONE | NONE | NONE | NONE |
| VK(ac)ILFNK (SEQ ID NO: 561) | PTBP1 | NONE | NONE | NONE | NONE | NONE | NONE |
| VK(ac)FIHDOTSPNPK (SEQ ID NO: 562) | SLC25A1 | NONE | NONE | NONE | NONE | NONE | NONE |
| YFDEK(ac)IAK (SEQ ID NO: 563) | BDH1 | NONE | NONE | NONE | NONE | NONE | NONE |
| LSLLSK(ac)FR (SEQ ID NO: 564) | HADHB | NONE | NONE | NONE | NONE | NONE | NONE |
| VK(ac)NELFK (SEQ ID NO: 565) | HADH | NONE | NONE | NONE | NONE | NONE | NONE |
| EVGKDVSDEK(ac)LR (SEQ ID NO: 566) | CS | NONE | NONE | NONE | NONE | NONE | NONE |
| SFLLK(ac)DSETSQR (SEQ ID NO: 567) | SHMT2 | NONE | NONE | NONE | NONE | NONE | NONE |
| VFEK(ac)YGR (SEQ ID NO: 568) | SRSF2 | NONE | NONE | NONE | NONE | NONE | NONE |
| NSNPALNDNLEK(ac)GLLK | CLIC1 | NONE | NONE | NONE | NONE | NONE | NONE |
| (SEQ ID NO: 569) | | | | | | | |
| LAAFGQLHK(ac)VLGMDPLPSK | ILF3 | NONE | NONE | NONE | NONE | NONE | NONE |
| (SEQ ID NO: 570) | | | | | | | |
| DVSYQGGK(ac)SIK (SEQ ID NO: 571) | MLL3 | NONE | NONE | NONE | NONE | NONE | NONE |
| SIDLK(ac)DK (SEQ ID NO: 572) | HSPD1 | NONE | NONE | NONE | NONE | NONE | NONE |
| MTDK(ac)CFR (SEQ ID NO: 573) | TIMM13 | NONE | NONE | NONE | NONE | NONE | NONE |
| HAHGDQYK(ac)ATDFVADR | IDH2 | NONE | NONE | NONE | NONE | NONE | NONE |
| (SEQ ID NO: 574) | | | | | | | |
| (ac)ACGLVASNLNLK(ac)PGECLR | LGALS1 | NONE | NONE | NONE | NONE | NONE | NONE |
| (SEQ ID NO: 575) | | | | | | | |
| HVVFGK(ac)VK (SEQ ID NO: 576) | PPIAP26 | NONE | NONE | NONE | NONE | NONE | NONE |
| AVLIDK(ac)DQSPK (SEQ ID NO: 577) | HIBCH | − | + | − | 0.00 | 0.48 | NA |
| YDDPEVQK(ac)DIK (SEQ ID NO: 578) | HSPA9 | NONE | NONE | NONE | NONE | NONE | NONE |
| DDNGK(ac)PYVLPSVR (SEQ ID NO: 579) | GOT2 | NONE | NONE | NONE | NONE | NONE | NONE |
| AGEATVK(ac)FLK (SEQ ID NO: 580) | MRPL9 | NONE | NONE | NONE | NONE | NONE | NONE |
| RNPDTQWITK(ac)PVHK (SEQ ID NO: 581) | RPL15 | NONE | NONE | NONE | NONE | NONE | NONE |
| LQDFK(ac)SFLLK (SEQ ID NO: 582) | SHMT2 | NONE | NONE | NONE | NONE | NONE | NONE |
| EFALK(ac)HLPNDPMFK (SEQ ID NO: 583) | CS | NONE | NONE | NONE | NONE | NONE | NONE |
| TACAINK(ac)VLMGR (SEQ ID NO: 584) | FAM98A | NONE | NONE | NONE | NONE | NONE | NONE |
| LMK(ac)YLLEQLK (SEQ ID NO: 585) | MB21D1 | NONE | NONE | NONE | NONE | NONE | NONE |
| ASEIGEK(ac)YR (SEQ ID NO: 586) | KIAA0947 | NONE | NONE | NONE | NONE | NONE | NONE |
| ITK(ac)SDGIR (SEQ ID NO: 587) | SLC25A6 | NONE | NONE | NONE | NONE | NONE | NONE |
| ELEAENYHDIK(ac)R (SEQ ID NO: 588) | SPTBN1 | NONE | NONE | NONE | NONE | NONE | NONE |
| NLHSK(ac)WLK (SEQ ID NO: 589) | SPTBN1 | NONE | NONE | NONE | NONE | NONE | NONE |
| LTSLNVK(ac)YNNDK (SEQ ID NO: 590) | ROD1 | NONE | NONE | NONE | NONE | NONE | NONE |
| VASK(ac)QLEEEDGSR (SEQ ID NO: 591) | COPG | NONE | NONE | NONE | NONE | NONE | NONE |
| TAWLDGK(ac)HVVFGK (SEQ ID NO: 592) | PPIB | NONE | NONE | NONE | NONE | NONE | NONE |
| VWNYK(ac)LR (SEQ ID NO: 593) | COPA | NONE | NONE | NONE | NONE | NONE | NONE |
| K(ac)NINCSIEESFQR (SEQ ID NO: 594) | HMGCL | NONE | NONE | NONE | NONE | NONE | NONE |
| YEK(ac)DIAAYR (SEQ ID NO: 595) | HMGB2 | NONE | NONE | NONE | NONE | NONE | NONE |
| FYK(ac)DVLEVGELAK (SEQ ID NO: 596) | NAA50 | − | − | + | 0.12 | −0.02 | 0.52 |
| VVK(ac)QASEGPLK (SEQ ID NO: 597) | GAPDH | NONE | NONE | NONE | NONE | NONE | NONE |
| TSSAFVGK(ac)TPEASPEPK | PSMD1 | NONE | NONE | NONE | NONE | NONE | NONE |
| (SEQ ID NO: 598) | | | | | | | |
| ADGIVSK(ac)NF (SEQ ID NO: 599) | RPS21 | NONE | NONE | NONE | NONE | NONE | NONE |
| ISEQSDAK(ac)LK (SEQ ID NO: 600) | ATP5A1 | NONE | NONE | NONE | NONE | NONE | NONE |
| K(ac)SSETLR (SEQ ID NO: 601) | CNP | NONE | NONE | NONE | NONE | NONE | NONE |
| SGLLDK(ac)WK (SEQ ID NO: 602) | LOC653566, | NONE | NONE | NONE | NONE | NONE | NONE |
| | SPCS2 | | | | | | |
| LNLDK(ac)MMEQK (SEQ ID NO: 603) | DLD | NONE | NONE | NONE | NONE | NONE | NONE |
| LAK(ac)YFFNK (SEQ ID NO: 604) | PWP2 | NONE | NONE | NONE | NONE | NONE | NONE |
| NSFDCFK(ac)K (SEQ ID NO: 605) | SLC25A13 | NONE | NONE | NONE | NONE | NONE | NONE |
| AGTFK(ac)MVFTPK (SEQ ID NO: 606) | IDH2 | NONE | NONE | NONE | NONE | NONE | NONE |
| SLNLK(ac)HIK (SEQ ID NO: 607) | SNORD84, | NONE | NONE | NONE | NONE | NONE | NONE |
| | DDX39B | | | | | | |
| DHCVAHK(ac)LFNNLK (SEQ ID NO: 608) | UQCRH | NONE | NONE | NONE | NONE | NONE | NONE |
| NVK(ac)FVLK (SEQ ID NO: 609) | SSR3 | NONE | NONE | NONE | NONE | NONE | NONE |
| VLTVINQTQK(ac)ENLR (SEQ ID NO: 610) | RPL35 | NONE | NONE | NONE | NONE | NONE | NONE |
| GAK(ac)PVVVLQK (SEQ ID NO: 611) | NIPBL | NONE | NONE | NONE | NONE | NONE | NONE |
| ELEK(ac)VCNPIITK (SEQ ID NO: 612) | HSPA8 | NONE | NONE | NONE | NONE | NONE | NONE |
| IHDVLCK(ac)LVEK (SEQ ID NO: 613) | LRPPRC | NONE | NONE | NONE | NONE | NONE | NONE |
| K(ac)FAYLGR (SEQ ID NO: 614) | SNORD32A, | NONE | NONE | NONE | NONE | NONE | NONE |
| | RPL13A, | | | | | | |
| | SNORD33, | | | | | | |
| | SNORD34 | | | | | | |
| SK(ac)GK(ac)NSDEEAPK | ING4 | NONE | NONE | NONE | NONE | NONE | NONE |
| (SEQ ID NO: 615) | | | | | | | |
| K(ac)EYVFADSK (SEQ ID NO: 616) | INPP5D, | NONE | NONE | NONE | NONE | NONE | NONE |
| | LOC646743 | | | | | | |
| EIAENALGK(ac)HK (SEQ ID NO: 617) | HNRNPH3 | NONE | NONE | NONE | NONE | NONE | NONE |
| FQK(ac)ELER (SEQ ID NO: 618) | MRPL44 | NONE | NONE | NONE | NONE | NONE | NONE |
| GFSLLATEDK(ac)EALKK (SEQ ID NO: 619) | PARP1 | NONE | NONE | NONE | NONE | NONE | NONE |
| VIISAPSADAPMFVMGVNHEK(ac)YDNSLK | GAPDH | NONE | NONE | NONE | NONE | NONE | NONE |
| (SEQ ID NO: 620) | | | | | | | |
| GAGTDEK(ac)TLTR (SEQ ID NO: 621) | ANXA6 | NONE | NONE | NONE | NONE | NONE | NONE |
| GPLDK(ac)WR (SEQ ID NO: 622) | RPL10L | NONE | NONE | NONE | NONE | NONE | NONE |
| EFHQAGK(ac)PIGLCCIAPVLAAK | C21orf33 | NONE | NONE | NONE | NONE | NONE | NONE |
| (SEQ ID NO: 623) | | | | | | | |
| TTLLYK(ac)LK (SEQ ID NO: 624) | ARL11 | NONE | NONE | NONE | NONE | NONE | NONE |
| VPNDK(ac)YYGAQTVR (SEQ ID NO: 625) | FH | NONE | NONE | NONE | NONE | NONE | NONE |
| ADTLTPEECQQFK(ac)K (SEQ ID NO: 626) | 7-Sep | NONE | NONE | NONE | NONE | NONE | NONE |
| AFAK(ac)ELFLGK (SEQ ID NO: 627) | ACAD9 | NONE | NONE | NONE | NONE | NONE | NONE |
| SYVSEK(ac)DVTSAK (SEQ ID NO: 628) | LRPPRC | NONE | NONE | NONE | NONE | NONE | NONE |
| LIGK(ac)QGR (SEQ ID NO: 629) | AKAP1 | NONE | NONE | NONE | NONE | NONE | NONE |
| EHTALLK(ac)IEGVYAR (SEQ ID NO: 630) | RPL35A | NONE | NONE | NONE | NONE | NONE | NONE |
| FNDGSDEK(ac)KK (SEQ ID NO: 631) | ATP5A1 | NONE | NONE | NONE | NONE | NONE | NONE |
| FSK(ac)SQLDIIIHSLK (SEQ ID NO: 632) | XRCC5 | NONE | NONE | NONE | NONE | NONE | NONE |
| LTCEEEEEK(ac)IFGR (SEQ ID NO: 633) | SMARCA2 | NONE | NONE | NONE | NONE | NONE | NONE |
| NDEELNK(ac)LLGR (SEQ ID NO: 634) | HIST1H2AE, | NONE | NONE | NONE | NONE | NONE | NONE |
| | HIST1H2AB, | | | | | | |
| | HIST1H2AD, | | | | | | |
| | HIST1H2AG, | | | | | | |
| | HIST1H2AK, | | | | | | |
| | HIST1H2AL, | | | | | | |
| | HIST1H2AM, | | | | | | |
| | HIST1H2AJ, | | | | | | |
| | HIST1H2AI | | | | | | |
| ALEAVFGK(ac)YGR (SEQ ID NO: 635) | RBMX | NONE | NONE | NONE | NONE | NONE | NONE |
| TFK(ac)TVFAEHISDECK (SEQ ID NO: 636) | SNORD43, | NONE | NONE | NONE | NONE | NONE | NONE |
| | RPL3 | | | | | | |
| YK(ac)PESEELTAER (SEQ ID NO: 637) | P4HB | NONE | NONE | NONE | NONE | NONE | NONE |
| NAEK(ac)YAEEDRR (SEQ ID NO: 638) | HSPA9 | NONE | NONE | NONE | NONE | NONE | NONE |
| SKSDPIMLLK(ac)DR (SEQ ID NO: 639) | PDHA1 | NONE | NONE | NONE | NONE | NONE | NONE |
| GVDPK(ac)FLR (SEQ ID NO: 640) | RPL29, | NONE | NONE | NONE | NONE | NONE | NONE |
| | RPL29P4 | | | | | | |
| LIK(ac)DGLIIR (SEQ ID NO: 641) | RPL19 | NONE | NONE | NONE | NONE | NONE | NONE |
| HLLPK(ac)IR (SEQ ID NO: 642) | PGD | NONE | NONE | NONE | NONE | NONE | NONE |
| LGK(ac)PSLVR (SEQ ID NO: 643) | ATAD3B | NONE | NONE | NONE | NONE | NONE | NONE |
| EQIYK(ac)LAK (SEQ ID NO: 644) | RPS13 | NONE | NONE | NONE | NONE | NONE | NONE |
| VEYFLK(ac)WK (SEQ ID NO: 645) | CBX3 | NONE | NONE | NONE | NONE | NONE | NONE |
| HYK(ac)TDFDK (SEQ ID NO: 646) | IDH2 | NONE | NONE | NONE | NONE | NONE | NONE |
| EGYAWAEDK(ac)EHCEEYGR | C22orf28 | NONE | NONE | NONE | NONE | NONE | NONE |
| (SEQ ID NO: 647) | | | | | | | |
| LAYIAHPK(ac)LGK (SEQ ID NO: 648) | RPL29, | NONE | NONE | NONE | NONE | NONE | NONE |
| | RPL29P4 | | | | | | |
| IFSQETLTK(ac)AQILK (SEQ ID NO: 649) | PCYOX1 | NONE | NONE | NONE | NONE | NONE | NONE |
| ALTGGIAHLFK(ac)QNK (SEQ ID NO: 650) | DLD | − | − | + | 0.18 | 0.07 | 0.42 |
| FYVK(ac)DHR (SEQ ID NO: 651) | CISD1 | NONE | NONE | NONE | NONE | NONE | NONE |
| SPVNTK(ac)SLFK (SEQ ID NO: 652) | PRKDC | NONE | NONE | NONE | NONE | NONE | NONE |
| HIVK(ac)EFK (SEQ ID NO: 653) | HSPA9 | NONE | NONE | NONE | NONE | NONE | NONE |
| MYKEEGLK(ac)AFYK (SEQ ID NO: 654) | SLC25A3 | NONE | NONE | NONE | NONE | NONE | NONE |
| LDAQVK(ac)ELVLK (SEQ ID NO: 655) | RPN1 | NONE | NONE | NONE | NONE | NONE | NONE |
| GYPTLK(ac)LFKPGQEAVK | TXNDC5, | NONE | NONE | NONE | NONE | NONE | NONE |
| (SEQ ID NO: 656) | MUTED, | | | | | | |
| | MUTED- | | | | | | |
| | TXNDC5 | | | | | | |
| EVCFACVDGK(ac)EFR (SEQ ID NO: 657) | CLTC | NONE | NONE | NONE | NONE | NONE | NONE |
| YK(ac)EALEQCR (SEQ ID NO: 658) | TAP2 | NONE | NONE | NONE | NONE | NONE | NONE |
| YELTGK(ac)FER (SEQ ID NO: 659) | ANXA6 | NONE | NONE | NONE | NONE | NONE | NONE |
| FIK(ac)IDGK (SEQ ID NO: 660) | RPS4X | NONE | NONE | NONE | NONE | NONE | NONE |
| LAMVK(ac)AEPDVK (SEQ ID NO: 661) | NDUFA5 | NONE | NONE | NONE | NONE | NONE | NONE |
| NEK(ac)LFYR (SEQ ID NO: 662) | ME3 | NONE | NONE | NONE | NONE | NONE | NONE |
| K(ac)FVCPECSK (SEQ ID NO: 663) | SP3 | NONE | NONE | NONE | NONE | NONE | NONE |
| DLSLDDFK(ac)GK (SEQ ID NO: 664) | PRDX3 | NONE | NONE | NONE | NONE | NONE | NONE |
| DLTDYLMK(ac)ILTER (SEQ ID NO: 665) | ACTBL2 | NONE | NONE | NONE | NONE | NONE | NONE |
| HGASPELQK(ac)QIR (SEQ ID NO: 666) | PEX11B | NONE | NONE | NONE | NONE | NONE | NONE |
| LNQLK(ac)PGLQYK (SEQ ID NO: 667) | ILF3 | NONE | NONE | NONE | NONE | NONE | NONE |
| ISK(ac)LYGDLK (SEQ ID NO: 668) | SDHA | NONE | NONE | NONE | NONE | NONE | NONE |
| LTSDDVK(ac)EQIYK (SEQ ID NO: 669) | RPS13 | NONE | NONE | NONE | NONE | NONE | NONE |
| SCNCLLLK(ac)VNQIGSVIESLQACK | ENO1 | NONE | NONE | NONE | NONE | NONE | NONE |
| (SEQ ID NO: 670) | | | | | | | |
| VTCIDPNPNFEK(ac)FLIK | METTL7A | + | − | − | 0.44 | 0.27 | 0.18 |
| (SEQ ID NO: 671) | | | | | | | |
| LILGLMMPPAHYDAK(ac)QLK | ANXA6 | NONE | NONE | NONE | NONE | NONE | NONE |
| (SEQ ID NO: 672) | | | | | | | |
| EVK(ac)LLLLGAGESGK (SEQ ID NO: 673) | GNAI3 | NONE | NONE | NONE | NONE | NONE | NONE |
| EAKPDELMDSK(ac)LR (SEQ ID NO: 674) | VAPA | NONE | NONE | NONE | NONE | NONE | NONE |
| YNWSAK(ac)AK (SEQ ID NO: 675) | RPL37 | NONE | NONE | NONE | NONE | NONE | NONE |
| GNK(ac)PWISLPR (SEQ ID NO: 676) | RPS4X | NONE | NONE | NONE | NONE | NONE | NONE |
| EVVEAHVDQK(ac)NK (SEQ ID NO: 677) | C21orf33 | NONE | NONE | NONE | NONE | NONE | NONE |
| LENDK(ac)SFR (SEQ ID NO: 678) | ECI1 | − | + | − | 0.12 | −0.38 | NA |
| LVAMK(ac)FLR (SEQ ID NO: 679) | NME1, | NONE | NONE | NONE | NONE | NONE | NONE |
| | NME2, | | | | | | |
| | NME1-NME2 | | | | | | |
| KVPFGK(ac)TYCCDLK (SEQ ID NO: 680) | MTCH2 | NONE | NONE | NONE | NONE | NONE | NONE |
| TK(ac)FVDGVSTVAR (SEQ ID NO: 681) | SMC2 | NONE | NONE | NONE | NONE | NONE | NONE |
| LAQLEEAK(ac)QASIQHIQNAIDTEK | ATP5F1 | NONE | NONE | NONE | NONE | NONE | NONE |
| (SEQ ID NO: 682) | | | | | | | |
| IPVPVQK(ac)NIDQQIK (SEQ ID NO: 683) | PRPF38B | NONE | NONE | NONE | NONE | NONE | NONE |
| YQLDKDGVVLFK(ac)K (SEQ ID NO: 684) | P4HB | NONE | NONE | NONE | NONE | NONE | NONE |
| VDIRPQLLK(ac)NALQR (SEQ ID NO: 685) | HP1BP3 | NONE | NONE | NONE | NONE | NONE | NONE |
| NQK(ac)LTATTQK (SEQ ID NO: 686) | TPR | NONE | NONE | NONE | NONE | NONE | NONE |
| YYK(ac)NIGLGFK (SEQ ID NO: 687) | RPS11 | NONE | NONE | NONE | NONE | NONE | NONE |
| SGK(ac)YDLDFK (SEQ ID NO: 688) | ENO1 | NONE | NONE | NONE | NONE | NONE | NONE |
| LYGDLK(ac)HLK (SEQ ID NO: 689) | SDHA | NONE | NONE | NONE | NONE | NONE | NONE |
| VENEAEK(ac)DLQCHAPVR | BRD7 | NONE | NONE | NONE | NONE | NONE | NONE |
| (SEQ ID NO: 690) | | | | | | | |
| DSLYK(ac)DAMQYASESK (SEQ ID NO: 691) | CLTC | NONE | NONE | NONE | NONE | NONE | NONE |
| TISAK(ac)YAEER (SEQ ID NO: 692) | MYH9 | NONE | NONE | NONE | NONE | NONE | NONE |
| (ac)ASNK(ac)TTLQK (SEQ ID NO: 693) | CBX3 | NONE | NONE | NONE | NONE | NONE | NONE |
| GYLADPAK(ac)FPEAR (SEQ ID NO: 694) | MRPL15 | NONE | NONE | NONE | NONE | NONE | NONE |
| SCEIK(ac)FLTFK (SEQ ID NO: 695) | MRPL39 | NONE | NONE | NONE | NONE | NONE | NONE |
| SELK(ac)HAK (SEQ ID NO: 696) | ALDH18A1 | NONE | NONE | NONE | NONE | NONE | NONE |
| SCGLNPK(ac)LEK (SEQ ID NO: 697) | ATRX | NONE | NONE | NONE | NONE | NONE | NONE |
| EVK(ac)VLLDQLR (SEQ ID NO: 698) | C20orf3 | NONE | NONE | NONE | NONE | NONE | NONE |
| KAVTK(ac)VQK (SEQ ID NO: 699) | HIST2H2BF | NONE | NONE | NONE | NONE | NONE | NONE |
| ILQK(ac)QGFK (SEQ ID NO: 700) | DLD | NONE | NONE | NONE | NONE | NONE | NONE |
| NK(ac)FGAPQK (SEQ ID NO: 701) | HADHA | NONE | NONE | NONE | NONE | NONE | NONE |
| VTAVHK(ac)ANIMK (SEQ ID NO: 702) | IDH3G | NONE | NONE | NONE | NONE | NONE | NONE |
| ACPEK(ac)HFAFK (SEQ ID NO: 703) | FAM3C | NONE | NONE | NONE | NONE | NONE | NONE |
| KPTLDK(ac)PSPETFVK (SEQ ID NO: 704) | HSD17B12 | NONE | NONE | NONE | NONE | NONE | NONE |
| QLAQK(ac)YNCDK (SEQ ID NO: 705) | UBA52 | NONE | NONE | NONE | NONE | NONE | NONE |
| YTAQVDAEEK(ac)EDVK (SEQ ID NO: 706) | ATP5H | NONE | NONE | NONE | NONE | NONE | NONE |
| PLISPQTSHK(ac)TLSK (SEQ ID NO: 707) | PDZD2 | NONE | NONE | NONE | NONE | NONE | NONE |
| ADK(ac)LAEEHSS (SEQ ID NO: 708) | ATP5B | NONE | NONE | NONE | NONE | NONE | NONE |
| DFGSFDK(ac)FK (SEQ ID NO: 709) | SOD2 | − | + | − | −0.28 | −0.48 | NA |
| KIDK(ac)YTEVLK (SEQ ID NO: 710) | SNORD32A, | NONE | NONE | NONE | NONE | NONE | NONE |
| | RPL13A, | | | | | | |
| | SNORD33, | | | | | | |
| | SNORD34 | | | | | | |
| CSK(ac)LPSSTK(ac)SGWPR | PHF15 | − | − | + | 0.11 | 0.04 | 0.43 |
| (SEQ ID NO: 711) | | | | | | | |
| KAINK(ac)AQK (SEQ ID NO: 712) | HIST1H2BM | NONE | NONE | NONE | NONE | NONE | NONE |
| EFPEK(ac)QELHR (SEQ ID NO: 713) | ZER1 | NONE | NONE | NONE | NONE | NONE | NONE |
| TDLEK(ac)DIISDTSGDFR | ANXA2P2 | NONE | NONE | NONE | NONE | NONE | NONE |
| (SEQ ID NO: 714) | | | | | | | |
| TPAQYDASELK(ac)ASMK (SEQ ID NO: 715) | ANXA2P2 | NONE | NONE | NONE | NONE | NONE | NONE |
| LTCYLCK(ac)QK (SEQ ID NO: 716) | BRD1 | NONE | NONE | NONE | NONE | NONE | NONE |
| AINK(ac)AQK(ac)K (SEQ ID NO: 717) | HIST1H2BM | NONE | NONE | NONE | NONE | NONE | NONE |
| KGIEK(ac)NLGIGK (SEQ ID NO: 718) | MDH2 | NONE | NONE | NONE | NONE | NONE | NONE |
| DNGK(ac)HALIIYDDLSK (SEQ ID NO: 719) | ATP5A1 | NONE | NONE | NONE | NONE | NONE | NONE |
| QLYNIYAK(ac)HTK (SEQ ID NO: 720) | CLPP | NONE | NONE | NONE | NONE | NONE | NONE |
| GKGDK(ac)AQIEK (SEQ ID NO: 721) | HSPD1 | NONE | NONE | NONE | NONE | NONE | NONE |
| K(ac)FLVHNVK (SEQ ID NO: 722) | RPL32 | NONE | NONE | NONE | NONE | NONE | NONE |
| GLIK(ac)LVSK (SEQ ID NO: 723) | RPS25 | NONE | NONE | NONE | NONE | NONE | NONE |
| IGFAEK(ac)VAAK (SEQ ID NO: 724) | FH | NONE | NONE | NONE | NONE | NONE | NONE |
| (ac)AEK(ac)FDCHYCR (SEQ ID NO: 725) | FHL1 | NONE | NONE | NONE | NONE | NONE | NONE |
| GALPLDTVTFYK(ac)VIPK | ERP29 | NONE | NONE | NONE | NONE | NONE | NONE |
| (SEQ ID NO: 726) | | | | | | | |
| HWGGNVLGPK(ac)SVAR (SEQ ID NO: 727) | RPL7A, | NONE | NONE | NONE | NONE | NONE | NONE |
| | SNORD24 | | | | | | |
| TITMK(ac)QLLR (SEQ ID NO: 728) | BCAT2 | NONE | NONE | NONE | NONE | NONE | NONE |
| SK(ac)FVLVK (SEQ ID NO: 729) | ERP29 | NONE | NONE | NONE | NONE | NONE | NONE |
| LVEDTK(ac)HRPK (SEQ ID NO: 730) | MRPL9 | NONE | NONE | NONE | NONE | NONE | NONE |
| TVGQLYK(ac)EQLAK (SEQ ID NO: 731) | MYH9 | NONE | NONE | NONE | NONE | NONE | NONE |
| AAETCQEPK(ac)EFR (SEQ ID NO: 732) | NDUFAF4 | NONE | NONE | NONE | NONE | NONE | NONE |
| VVLIGDSGVGK(ac)SNLLSR | RAB11B | NONE | NONE | NONE | NONE | NONE | NONE |
| (SEQ ID NO: 733) | | | | | | | |
| SGK(ac)YVLGYK (SEQ ID NO: 734) | RPL30 | NONE | NONE | NONE | NONE | NONE | NONE |
| ILMEHIHK(ac)LK (SEQ ID NO: 735) | RPL19 | NONE | NONE | NONE | NONE | NONE | NONE |
| EK(ac)VFYSLMR (SEQ ID NO: 736) | EPHX1 | NONE | NONE | NONE | NONE | NONE | NONE |
| K(ac)FDQLLAEEK (SEQ ID NO: 737) | MYH9 | NONE | NONE | NONE | NONE | NONE | NONE |
| FVEFDMK(ac)PVCK (SEQ ID NO: 738) | LIMS2 | NONE | NONE | NONE | NONE | NONE | NONE |
| K(ac)GFITVDGR (SEQ ID NO: 739) | LAMA1 | NONE | NONE | NONE | NONE | NONE | NONE |
| KAEAQIAAK(ac)NLDK (SEQ ID NO: 740) | GOT2 | NONE | NONE | NONE | NONE | NONE | NONE |
| DK(ac)QFVAK (SEQ ID NO: 741) | SND1 | NONE | NONE | NONE | NONE | NONE | NONE |
| AGACNTVIK(ac)QLMR (SEQ ID NO: 742) | ATP2A3 | NONE | NONE | NONE | NONE | NONE | NONE |
| KQQAK(ac)FDECVLDK (SEQ ID NO: 743) | NDUFA8 | NONE | NONE | NONE | NONE | NONE | NONE |
| ALCTGEK(ac)GFGYK (SEQ ID NO: 744) | PPIF | NONE | NONE | NONE | NONE | NONE | NONE |
| IYK(ac)SDGIK (SEQ ID NO: 745) | SLC25A5 | NONE | NONE | NONE | NONE | NONE | NONE |
| DEGGK(ac)AFFK (SEQ ID NO: 746) | SLC25A5 | NONE | NONE | NONE | NONE | NONE | NONE |
| SYLK(ac)EFR (SEQ ID NO: 747) | TECR | NONE | NONE | NONE | NONE | NONE | NONE |
| VPK(ac)TAENFR (SEQ ID NO: 748) | PPID | NONE | NONE | NONE | NONE | NONE | NONE |
| VNCLDK(ac)FWHK (SEQ ID NO: 749) | LASP1 | NONE | NONE | NONE | NONE | NONE | NONE |
| KGEDFVK(ac)TLK (SEQ ID NO: 750) | MDH2 | − | + | − | 0.15 | 0.49 | NA |
| EAEFTK(ac)SIAK (SEQ ID NO: 751) | LOC653566, | NONE | NONE | NONE | NONE | NONE | NONE |
| | SPCS2 | | | | | | |
| SGYYK(ac)VLGK (SEQ ID NO: 752) | RPL27A | NONE | NONE | NONE | NONE | NONE | NONE |
| YVLGYK(ac)QTLK (SEQ ID NO: 753) | RPL30 | NONE | NONE | NONE | NONE | NONE | NONE |
| FEDK(ac)TVAYTEQK (SEQ ID NO: 754) | PDIA3 | NONE | NONE | NONE | NONE | NONE | NONE |
| IVNALK(ac)SQVDK (SEQ ID NO: 755) | OAT | NONE | NONE | NONE | NONE | NONE | NONE |
| ILEFFGLK(ac)K (SEQ ID NO: 756) | P4HB | NONE | NONE | NONE | NONE | NONE | NONE |
| LCGQDLNK(ac)TSR (SEQ ID NO: 757) | DPAGT1 | NONE | NONE | NONE | NONE | NONE | NONE |
| VYFK(ac)DTHPK (SEQ ID NO: 758) | CYB5R3 | NONE | NONE | NONE | NONE | NONE | NONE |
| ILSK(ac)LSEETK (SEQ ID NO: 759) | UFL1 | NONE | NONE | NONE | NONE | NONE | NONE |
| ATWK(ac)SNYFLK (SEQ ID NO: 760) | RPLP0 | NONE | NONE | NONE | NONE | NONE | NONE |
| AVDSQILPK(ac)IK (SEQ ID NO: 761) | RPL6 | NONE | NONE | NONE | NONE | NONE | NONE |
| EK(ac)LQEEMLQR (SEQ ID NO: 762) | VIM | NONE | NONE | NONE | NONE | NONE | NONE |
| MIYASSK(ac)DAIKK (SEQ ID NO: 763) | CFL1 | NONE | NONE | NONE | NONE | NONE | NONE |
| YNDPIYVK(ac)LEK (SEQ ID NO: 764) | AP1B1 | NONE | NONE | NONE | NONE | NONE | NONE |
| VTDDLVCLVYK(ac)TDQAQDVK | SRP9 | NONE | NONE | NONE | NONE | NONE | NONE |
| (SEQ ID NO: 765) | | | | | | | |
| TVVNK(ac)DVFR (SEQ ID NO: 766) | RPL27 | NONE | NONE | NONE | NONE | NONE | NONE |
| NLQEAEEWYK(ac)SK (SEQ ID NO: 767) | PRPH | NONE | NONE | NONE | NONE | NONE | NONE |
| Mac)FGGPGAR (SEQ ID NO: 768) | RPS16 | NONE | NONE | NONE | NONE | NONE | NONE |
| LLLLGAGESGK(ac)STIVK | GNAL | NONE | NONE | NONE | NONE | NONE | NONE |
| (SEQ ID NO: 769) | | | | | | | |
| SFVK(ac)VYNYNHLMPTR (SEQ ID NO: 770) | RPL27 | NONE | NONE | NONE | NONE | NONE | NONE |
| YVK(ac)ALFR (SEQ ID NO: 771) | TOMM70A | NONE | NONE | NONE | NONE | NONE | NONE |
| LEPLK(ac)PLK (SEQ ID NO: 772) | PRR12 | NONE | NONE | NONE | NONE | NONE | NONE |
| VGDK(ac)VLLPEYGGTK (SEQ ID NO: 773) | HSPE1 | NONE | NONE | NONE | NONE | NONE | NONE |
| GGVVGIK(ac)VDK (SEQ ID NO: 774) | ALDOA | NONE | NONE | NONE | NONE | NONE | NONE |
| VAFK(ac)YCQK (SEQ ID NO: 775) | ALG5 | NONE | NONE | NONE | NONE | NONE | NONE |
| SVPHLQK(ac)VFDR (SEQ ID NO: 776) | ANXA2P2 | NONE | NONE | NONE | NONE | NONE | NONE |
| VYK(ac)EMYK (SEQ ID NO: 777) | ANXA2P2 | NONE | NONE | NONE | NONE | NONE | NONE |
| SELTGK(ac)FEK (SEQ ID NO: 778) | ANXA5 | − | + | − | 0.31 | 0.40 | NA |
| EFIEK(ac)YDK (SEQ ID NO: 779) | ANXA6 | NONE | NONE | NONE | NONE | NONE | NONE |
| ESCSK(ac)HASGTSFHLPQPSFR | BRPF3 | NONE | NONE | NONE | NONE | NONE | NONE |
| (SEQ ID NO: 780) | | | | | | | |
| KAEAAVVAVAEK(ac)R (SEQ ID NO: 781) | C11orf31 | NONE | NONE | NONE | NONE | NONE | NONE |
| VNK(ac)EVER (SEQ ID NO: 782) | C21orf33 | NONE | NONE | NONE | NONE | NONE | NONE |
| GFSIPECQK(ac)LLPK (SEQ ID NO: 783) | CS | NONE | NONE | NONE | NONE | NONE | NONE |
| CINIILK(ac)NDK (SEQ ID NO: 784) | CXorf59 | NONE | NONE | NONE | NONE | NONE | NONE |
| NEEATK(ac)HLECTK (SEQ ID NO: 785) | FXR1 | NONE | NONE | NONE | NONE | NONE | NONE |
| AGK(ac)DSGMac)AK (SEQ ID NO: 786) | H2AFV | NONE | NONE | NONE | NONE | NONE | NONE |
| ESK(ac)ALMGLYHGQVLCK | HADHA | NONE | NONE | NONE | NONE | NONE | NONE |
| (SEQ ID NO: 787) | | | | | | | |
| FGAPQK(ac)DVK (SEQ ID NO: 788) | HADHA | NONE | NONE | NONE | NONE | NONE | NONE |
| ILQEGVDPK(ac)K (SEQ ID NO: 789) | HADHA | NONE | NONE | NONE | NONE | NONE | NONE |
| GSK(ac)K(ac)AITK (SEQ ID NO: 790) | HIST1H2BB | NONE | NONE | NONE | NONE | NONE | NONE |
| PEPTK(ac)SAPAPK(ac)K | HIST1H2BD | NONE | NONE | NONE | NONE | NONE | NONE |
| (SEQ ID NO: 791) | | | | | | | |
| GSK(ac)K(ac)AINK (SEQ ID NO: 792) | HIST1H2BM | NONE | NONE | NONE | NONE | NONE | NONE |
| K(ac)AINK(ac)AQK (SEQ ID NO: 793) | HIST1H2BM | − | + | − | NA | −0.97 | 0.27 |
| K(ac)AVTK(ac)AQK (SEQ ID NO: 794) | HIST2H2BE | NONE | NONE | NONE | NONE | NONE | NONE |
| PEPAK(ac)SAPAPKK (SEQ ID NO: 795) | HIST2H2BE | NONE | NONE | NONE | NONE | NONE | NONE |
| K(ac)QLATK(ac)AAR (SEQ ID NO: 796) | HIST2H3D, | NONE | NONE | NONE | NONE | NONE | NONE |
| | HIST2H3A, | | | | | | |
| | HIST2H3C | | | | | | |
| TEMDWVLK(ac)HSGPNSADSANDGFVR | HNRNPF | NONE | NONE | NONE | NONE | NONE | NONE |
| (SEQ ID NO: 797) | | | | | | | |
| ADLIK(ac)QYGR (SEQ ID NO: 798) | HSDL1 | NONE | NONE | NONE | NONE | NONE | NONE |
| FYEQFSK(ac)NIK (SEQ ID NO: 799) | HSP90AA1 | NONE | NONE | NONE | NONE | NONE | NONE |
| LMK(ac)ICMNEDPAK (SEQ ID NO: 800) | ILK | NONE | NONE | NONE | NONE | NONE | NONE |
| (ac)ASPSLERPEK(ac)GAGK | KRR1 | NONE | NONE | NONE | NONE | NONE | NONE |
| (SEQ ID NO: 801) | | | | | | | |
| INKALDK(ac)TK (SEQ ID NO: 802) | MYH9 | − | + | − | NA | 4.75 | NA |
| IANILK(ac)DKDPPIPVAK | PDIA4 | NONE | NONE | NONE | NONE | NONE | NONE |
| (SEQ ID NO: 803) | | | | | | | |
| NTEDLQCYVK(ac)PTK (SEQ ID NO: 804) | PHF16 | NONE | NONE | NONE | NONE | NONE | NONE |
| VDEVK(ac)STIK (SEQ ID NO: 805) | RPL10A | NONE | NONE | NONE | NONE | NONE | NONE |
| KLQK(ac)AALLK (SEQ ID NO: 806) | RPL14 | NONE | NONE | NONE | NONE | NONE | NONE |
| YSVDIPLDK(ac)TVVNK (SEQ ID NO: 807) | RPL27 | NONE | NONE | NONE | NONE | NONE | NONE |
| LNK(ac)AVWAK (SEQ ID NO: 808) | RPL31 | NONE | NONE | NONE | NONE | NONE | NONE |
| K(ac)FGQGSR (SEQ ID NO: 809) | RPS29 | NONE | NONE | NONE | NONE | NONE | NONE |
| DQTK(ac)SIVEK (SEQ ID NO: 810) | RTN3 | NONE | NONE | NONE | NONE | NONE | NONE |
| YMVK(ac)SCGK (SEQ ID NO: 811) | SNORA70, | NONE | NONE | NONE | NONE | NONE | NONE |
| | RPL10 | | | | | | |
| LAHEVGWK(ac)YQAVTATLEEK | SNORD32A, | NONE | NONE | NONE | NONE | NONE | NONE |
| (SEQ ID NO: 812) | RPL13A, | | | | | | |
| | SNORD33, | | | | | | |
| | SNORD34 | | | | | | |
| ALEK(ac)IDLK (SEQ ID NO: 813) | SNORD43, | NONE | NONE | NONE | NONE | NONE | NONE |
| | RPL3 | | | | | | |
| AMMEK(ac)LVK(ac)SISQLK | STAT2 | NONE | NONE | NONE | NONE | NONE | NONE |
| (SEQ ID NO: 814) | | | | | | | |
| LLGITK(ac)ECVMR (SEQ ID NO: 815) | TLN1 | NONE | NONE | NONE | NONE | NONE | NONE |
| GK(ac)GK(ac)AGR (SEQ ID NO: 816) | TPPP | NONE | NONE | NONE | NONE | NONE | NONE |
| LGDVISIQPCPDVK(ac)YGK | VCP | NONE | NONE | NONE | NONE | NONE | NONE |
| (SEQ ID NO: 817) | | | | | | | |

### Example 3

### Biological Pathway Analysis

[0105] This example describes the biological pathway analysis that was performed on each of Compound A, Compound B, and Tubastatin A.

[0106] Once biomarker peptides were identified for a specific drug (either Compound A, Compound B, or Tubastatin A) by the SILAC method in Example 1, the biomarker peptides were compared to peptides/proteins in the biological pathway database at www dot broadinstitute dot org/gsea/index dot jsp in order to identify major biological pathways or functions implicated by the drug's action.

[0107] The results of the biological pathway analysis for each of Compound B, Tubastatin A, and Compound A, are in Tables 3, 5, and 7, respectively. Only the top 50 pathways identified for each drug are listed in each of Tables 3, 5, and 7.

[0108] The first column of Tables 3, 5, and 7 shows the name of the pathway implicated.

[0109] The second column of Tables 3, 5, and 7 shows the number of genes in the pathway observed for each drug treated group of cells.

[0110] The third column of Tables 3, 5, and 7 shows the total number of genes in the pathway stated in the first column.

[0111] The fourth column of Tables 3, 5, and 7 shows the ratio of the number in the second column to the number in the third column.

[0112] The fifth column of Tables 3, 5, and 7 shows the p-value for the numbers in the second and third columns.

[0113] The sixth column of Tables 3, 5, and 7 gives a description of the pathway identified in the first column.

TABLE 3
(Compound B (+))

| Pathway | Observed | Pathway_size | Ratio | P-value | Description | Code |
|---|---|---|---|---|---|---|
| PUJANA_BRCA1_ PCC _ | 68 | 1651 | 0.041187 | 1.19E−52 | Genes constituting the BRCA1-PCC | A |
| NETWORK | | | | | network of transcripts whose ex- | |
| | | | | | pression positively correlated | |
| | | | | | (Pearson correlation coefficient, | |
| | | | | | PCC ≧ 0.4) with that of BRCA1 | |
| | | | | | <ahref=‘http://www.ncbi.nlm.nih. | |
| | | | | | gov/gene/672’>[GeneID=672]</a> | |
| | | | | | across a compendium of normal | |
| | | | | | tissues. | |
| DIAZ_CHRONIC_ | 58 | 1382 | 0.041968 | 6.25E−45 | Genes up-regulated in CD34+ | D |
| MEYLOGENOUS_ | | | | | <ahref=‘http://www.ncbi.nlm.nih. | |
| LEUKEMIA _UP | | | | | gov/gene/947’>[GeneID=947]</a> | |
| | | | | | cells isolated from bone marrow | |
| | | | | | of CML (chronic myelogenous | |
| | | | | | leukemia) patients, compared | |
| | | | | | to those from normal donors. | |
| MORF_RAN | 33 | 268 | 0.123134 | 9.76E−41 | Neighborhood of RAN | A |
| HSIAO_HOUSEKEEP- | 36 | 389 | 0.092545 | 7.98E−40 | Housekeeping genes identified | A |
| ING_GENES | | | | | as expressed across 19 normal | |
| | | | | | tissues. | |
| MORF_UBE2I | 31 | 238 | 0.130252 | 4.38E−39 | Neighborhood of UBE2I | A |
| MORF_RAD23A | 34 | 345 | 0.098551 | 1.43E−38 | Neighborhood of RAD23A | D |
| BLALOCK_ | 49 | 1237 | 0.039612 | 1.49E−36 | Genes down-regulated in brain | C |
| ALZHEIMERS_ | | | | | from patients with Alzheimer's | |
| DISEASE_DN | | | | | disease. | |
| MORF_HDAC1 | 30 | 254 | 0.11811 | 1.63E−36 | Neighborhood of HDAC1 | B |
| DANG_BOUND_BY_ | 46 | 1102 | 0.041742 | 2.89E−35 | Genes whose promoters are | A |
| MYC | | | | | bound by MYC | |
| | | | | | <ahref=‘http://www. | |
| | | | | | ncbi.nlm.nih.gov/gene/4609’> | |
| | | | | | [GeneID=4609]</a>, according | |
| | | | | | to MYC Target Gene Database. | |
| INTRACELLULAR_ | 47 | 1192 | 0.03943 | 6.12E−35 | Genes annotated by the GO | D |
| ORGANELLE _PART | | | | | term GO:0044446. A constituent | |
| | | | | | part of an intracellular organelle, | |
| | | | | | an organized structure of | |
| | | | | | distinctive morphology and | |
| | | | | | function, occurring within the cell. | |
| | | | | | Includes constituent parts of the | |
| | | | | | nucleus, mitochondria, plastids, | |
| | | | | | vacuoles, vesicles, ribosomes and | |
| | | | | | the cytoskeleton but excludes the | |
| | | | | | plasma membrane. | |
| ORGANELLE_PART | 47 | 1197 | 0.039265 | 7.38E−35 | Genes annotated by the GO | D |
| | | | | | term GO:0044422. Any constituent | |
| | | | | | part of an organelle, an organized | |
| | | | | | Structure of distinctive morphology | |
| | | | | | and function. Includes constituent | |
| | | | | | parts of the nucleus, mitochondria, | |
| | | | | | plastids, vacuoles, vesicles, | |
| | | | | | ribosomes and the cytoskeleton, but | |
| | | | | | excludes the plasma membrane. | |
| MORF_ANP32B | 27 | 197 | 0.137056 | 9.45E−35 | Neighborhood of ANP32B | A |
| MORF_DEK | 29 | 262 | 0.110687 | 1.79E−34 | Neighborhood of DEK | B |
| MORF_GNB1 | 30 | 303 | 0.09901 | 3.76E−34 | Neighborhood of GNB1 | D |
| PUJANA_CHEK2_ | 39 | 778 | 0.050129 | 7.75E−33 | Genes constituting the CHEK2- | D |
| PCC _ NETWORK | | | | | PCC network of transcripts whose | |
| | | | | | expression positively correlates | |
| | | | | | (Pearson correlation coefficient, | |
| | | | | | PCC ≧ 0.4) with that of CHEK2 | |
| | | | | | <ahref=‘http://www.ncbi.nlm.nih. | |
| | | | | | gov/gene/11200’>[GeneID= | |
| | | | | | 11200]</a>. | |
| GRADE_COLON_ | 40 | 870 | 0.045977 | 3.12E−32 | Up-regulated genes in colon | A |
| CANCER_UP | | | | | carcinoma tumors compared to the | |
| | | | | | matched normal mucosa samples. | |
| MORF_CTBP1 | 24 | 168 | 0.142857 | 1.94E−31 | Neighborhood of CTBP1 | D |
| MORF_XRCC5 | 26 | 234 | 0.111111 | 4.97E−31 | Neighborhood of XRCC5 | D |
| MORF_BUB3 | 27 | 276 | 0.097826 | 1.16E−30 | Neighborhood of BUB3 | D |
| MORF_CSNK2B | 27 | 287 | 0.094077 | 3.38E−30 | Neighborhood of CSNK2B | D |
| MORF_G22P1 | 23 | 171 | 0.134503 | 1.55E−29 | Neighborhood of G22P1 | D |
| MORF_EIF3S2 | 25 | 244 | 0.102459 | 5.75E−29 | Neighborhood of EIF3S2 | D |
| REACTOME_CELL_ | 29 | 412 | 0.070388 | 1.03E−28 | Genes involved in Cell Cycle | D |
| CYCLE | | | | | | |
| BENPORATH_MYC_ | 35 | 775 | 0.045161 | 5.78E−28 | Set ‘Myc targets2’: targets of c-Myc | D |
| MAX_TARGETS | | | | | <ahref=‘http://www.ncbi.nlm.nih. | |
| | | | | | gov/gene/4609’>[GeneID=4609] | |
| | | | | | </a> and Max <ahref =‘http://www. | |
| | | | | | ncbi.nlm.nih.gov/gene/4149’> | |
| | | | | | [GeneID=4149]</a> identified by | |
| | | | | | Chip on chip in a Burkitt's | |
| | | | | | lymphoma cell line; overlap set. | |
| LOPEZ_MBD_ | 37 | 957 | 0.038662 | 3.57E−27 | Genes up-regulated in HeLa | D |
| TARGETS | | | | | cells (cervical cancer) after | |
| | | | | | simultaneus knockdown of all | |
| | | | | | three MBD (methyl-CpG binding | |
| | | | | | domain) proteins MeCP2, MBD1 | |
| | | | | | and MBD2 [GeneID=4204;4152; | |
| | | | | | 8932] by RNAi. | |
| CYTOPLASM | 50 | 2130 | 0.023474 | 8.02E−27 | Genes annotated by the GO | A |
| | | | | | term GO:0005737. All of the | |
| | | | | | contents of a cell excluding the | |
| | | | | | plasma membrane and nucleus, | |
| | | | | | but including other subcellular | |
| | | | | | structures. | |
| MORF_SKP1A | 22 | 202 | 0.108911 | 3.33E−26 | Neighborhood of SKP1A | D |
| MORF_AATF | 22 | 205 | 0.107317 | 4.64E−26 | Neighborhood of AATF | D |
| MORF_ACP1 | 22 | 210 | 0.104762 | 7.99E−26 | Neighborhood of ACP1 | D |
| REACTOME_PACKAG- | 15 | 48 | 0.3125 | 1.08E−25 | Genes involved in Packaging | A |
| ING_OF_TELOMERE_ | | | | | Of Telomere Ends | |
| ENDS | | | | | | |
| PENG_GLUTAMINE_ | 25 | 337 | 0.074184 | 1.97E−25 | Genes down-regulated in BJAB | D |
| DEPRIVATION_DN | | | | | cells (B-lymphoma) after | |
| | | | | | glutamine <ahref=‘http://pubchem. | |
| | | | | | ncbi.nlm.nih.gov/summary/ | |
| | | | | | summary.cgi?cid=738’> | |
| | | | | | [PubChem=738]</a> deprivation. | |
| PENG_LEUCINE_ | 21 | 187 | 0.112299 | 2.39E−25 | Genes down-regulated in BJAB | D |
| DEPRIVATION_DN | | | | | cells (B-lymphoma) after leucine | |
| | | | | | <ahref=‘http://pubchem.ncbi.nlm. | |
| | | | | | nih.gov/summary/summary. cgi? | |
| | | | | | cid=857’>[PubChem=857]</a> | |
| | | | | | deprivation. | |
| CASORELLI_ACUTE_ | 31 | 662 | 0.046828 | 2.71E−25 | Genes down-regulated in APL | D |
| PROMYELOCYTIC_ | | | | | (acute promyeolocytic leukemia) | |
| LEUKEMIA_ DN | | | | | blasts expressing PML-RARA | |
| | | | | | fusion [GeneID=5371;5914] | |
| | | | | | compared to normal promyeloblasts. | |
| MORF_DAP3 | 21 | 193 | 0.108808 | 4.73E−25 | Neighborhood of DAP3 | D |
| MORF_NPM1 | 20 | 162 | 0.123457 | 4.83E−25 | Neighborhood of NPM1 | A |
| PUJANA_ATM_PCC_ | 41 | 1440 | 0.028472 | 4.84E−25 | Genes constituting the ATM-PCC | D |
| N ETWORK | | | | | network of transcripts whose | |
| | | | | | expression positively correlated | |
| | | | | | (Pearson correlation coefficient, | |
| | | | | | PCC ≧ 0.4) with that of ATM | |
| | | | | | <ahref=‘http://www.ncbi.nlm. | |
| | | | | | nih.gov/gene/472’>[GeneID=472] | |
| | | | | | </a> across a compendium of | |
| | | | | | normal tissues. | |
| KIM_BIPOLAR_ | 31 | 681 | 0.045521 | 6.27E−25 | Genes whose expression | C |
| DISORDER_OLIGO- | | | | | significantly and positively | |
| DENDROCYTE_ | | | | | correlated with oligodendrocyte | |
| DENSITY_CORR_UP | | | | | density in layer VI of BA9 brain | |
| | | | | | region in patients with bipolar | |
| | | | | | disorder. | |
| REACTOME_MEIOTIC_ | 16 | 71 | 0.225352 | 9.73E−25 | Genes involved in Meiotic | A |
| SYNAPSIS | | | | | Synapsis | |
| MORF_SOD1 | 23 | 277 | 0.083032 | 1.34E−24 | Neighborhood of SOD1 | D |
| GRAESSMANN_ | 44 | 1781 | 0.024705 | 1.99E−24 | Genes down-regulated in ME- | D |
| APOPTOSIS_BY_ | | | | | A cells (breast cancer) undergoing | |
| DOXORUBICIN_DN | | | | | apoptosis in response to doxorubi- | |
| | | | | | cin <ahref=‘http://pubchem.ncbi. | |
| | | | | | nlm.nih.gov/summary/summary. | |
| | | | | | cgi?cid= 31703’>[PubChem= | |
| | | | | | 31703]</a>. | |
| NUCLEUS | 40 | 1428 | 0.028011 | 3.57E−24 | Genes annotated by the GO term | D |
| | | | | | GO:0005634. A membrane- | |
| | | | | | bounded organelle of eukaryotic | |
| | | | | | cells in which chromosomes are | |
| | | | | | housed and replicated. In most cells, | |
| | | | | | the nucleus contains all of the | |
| | | | | | cell's chromosomes except the | |
| | | | | | organellar chromosomes, and is | |
| | | | | | the site of RNA synthesis and | |
| | | | | | processing. In some species, or in | |
| | | | | | specialized cell types, RNA | |
| | | | | | metabolism or DNA replication | |
| | | | | | may be absent. | |
| MACROMOLECULAR_ | 34 | 945 | 0.035979 | 5.28E−24 | Genes annotated by the GO term | D |
| COMPLEX | | | | | GO:0032991. A stable assembly of | |
| | | | | | two or more macromolecules, i.e. | |
| | | | | | proteins, nucleic acids, carbohy- | |
| | | | | | drates or lipids, in which the | |
| | | | | | constituent parts function together. | |
| MORF_RAD21 | 20 | 182 | 0.10989 | 5.34E−24 | Neighborhood of RAD21 | D |
| REACTOME_RNA_POL_ | 15 | 61 | 0.245902 | 6.69E−24 | Genes involved in RNA | A |
| I_PROM_OTER_OPENING | | | | | Polymerase I Promoter Opening | |
| DODD_NASOPHARYN- | 39 | 1368 | 0.028509 | 7.61E−24 | Genes down-regulated in | D |
| GEAL_CARCINOMA_ | | | | | nasopharyngeal carcinoma (NPC) | |
| DN | | | | | compared to the normal tissue. | |
| MORF_NME2 | 19 | 154 | 0.123377 | 7.7E−24 | Neighborhood of NME2 | A |
| MORF_PPP2CA | 18 | 127 | 0.141732 | 8.9E−24 | Neighborhood of PPP2CA | D |
| PILON_KLF1_ | 45 | 1972 | 0.022819 | 1.33E−23 | Genes down-regulated in | D |
| TARGETS_DN | | | | | erythroid progenitor cells from | |
| | | | | | fetal livers of E13.5 embryos with | |
| | | | | | KLF1 | |
| | | | | | <ahref=‘http://www.ncbi.nlm. | |
| | | | | | nih.gov/gene/10661’>[GeneID= | |
| | | | | | 10661]</a> knockout compared to | |
| | | | | | those from the wild type embryos. | |
| REACTOME_DEPOSI- | 15 | 64 | 0.234375 | 1.5E−23 | Genes involved in Deposition of | A |
| TION_OF_NEW_ | | | | | New CENPA-containing | |
| CENPA_CONTAINING_ | | | | | Nucleosomes at the Centromere | |
| NUCLEOSOMES_AT_ | | | | | | |
| THE_CENTROMERE | | | | | | |
| GGGCGGR_V$SP1_Q6 | 53 | 2939 | 0.018033 | 3.63E−23 | Genes with promoter regions [−2kb, | D |
| | | | | | 2kb] around transcription start site | |
| | | | | | containing the motif GGGCGGR | |
| | | | | | which matches annotation for | |
| | | | | | SP1:Sp1 transcription factor | |

[0114] Table 4 below shows, by letter coding, the relatedness of the pathways for the drugs (Compound B, Tubastatin A, and Compound A) tested in the pathway analysis.

TABLE 4

| | | Code |
|---|---|---|
| in Compound B & Tubastatin A & Compound A | 14 | A |
| in Compound B & Tubastatin A but not Compound A | 2 | B |
| in Compound B & Compound A but not Tubastatin A | 2 | C |
| in Compound B only | 32 | D |

TABLE 5
(Tubastatin A (+))

| Pathway | Observed | Pathway_size | Ratio | P-value | Description | Code |
|---|---|---|---|---|---|---|
| HSIAO_HOUSE- | 68 | 389 | 0.174807 | 1.32606E−81 | Housekeeping genes identified | A |
| KEEPING_GENES | | | | | as expressed across 19 normal | |
| | | | | | tissues. | |
| REACTOME_RNA_ | 40 | 61 | 0.655738 | 2.55683E−76 | Genes involved in RNA | A |
| POL_I_PROMOTER_ | | | | | Polymerase I Promoter | |
| OPENING | | | | | Opening | |
| KEGG_SYSTEMIC_ | 47 | 139 | 0.338129 | 2.31143E−71 | Systemic lupus erythematosus | E |
| LUPUS_ERYTHEMA- | | | | | | |
| TOSUS | | | | | | |
| REACTOME_ | 41 | 84 | 0.488095 | 1.47655E−70 | Genes involved in Meiotic | E |
| MEIOTIC_RECOM- | | | | | Recombination | |
| BINATION | | | | | | |
| REACTOME_AMY- | 40 | 81 | 0.493827 | 4.05384E−69 | Genes involved in Amyloids | E |
| LOIDS | | | | | | |
| REACTOME_RNA_ | 40 | 86 | 0.465116 | 1.00565E−67 | Genes involved in RNA | E |
| POL_I_TRANSCRIP- | | | | | PolymeraselTranscription | |
| TION | | | | | | |
| REACTOME_MEIOSIS | 42 | 112 | 0.375 | 4.41037E−66 | Genes involved in Meiosis | E |
| REACTOME_RNA_ | 40 | 119 | 0.336134 | 1.21576E−60 | Genes involved in RNA | E |
| POL_I_RNA_POL_ | | | | | Polymerase I, RNA | |
| III_AND_MITOCHON- | | | | | Polymerase III, and | |
| DRIAL_TRANSCRIP- | | | | | Mitochondrial Transcription | |
| TION | | | | | | |
| MORF_NPM1 | 43 | 162 | 0.265432 | 5.15E−60 | Neighborhood of NPM1 | A |
| REACTOME_TRANS- | 45 | 207 | 0.217391 | 2.0126E−58 | Genes involved in | E |
| CRIPTION | | | | | Transcription | |
| MODULE_83 | 50 | 320 | 0.15625 | 3.51799E−57 | Genes in the cancer module 83 | E |
| PUJANA_BRCA1_ | 84 | 1651 | 0.050878 | 4.37079E−56 | Genes constituting the | A |
| PCC _NETWORK | | | | | BRCA1-PCC network of | |
| | | | | | transcripts whose expression | |
| | | | | | positively correlated (Pearson | |
| | | | | | correlation coefficient, PCC ≧ | |
| | | | | | 0.4) with That of BRCA1 | |
| | | | | | <ahref=‘http://www.ncbi.nlm. | |
| | | | | | nih.gov/gene/672’>[GeneID= | |
| | | | | | 672]</a> across a compendium | |
| | | | | | of normal tissues. | |
| REACTOME_METABO- | 56 | 496 | 0.112903 | 6.93223E−56 | Genes involved in Metabolism | E |
| LISM_OF_PROTEINS | | | | | of proteins | |
| MODULE_151 | 49 | 318 | 0.154088 | 1.01135E−55 | Genes in the cancer module 151 | E |
| MORF_ACTG1 | 39 | 138 | 0.282609 | 1.09872E−55 | Neighborhood of ACTG1 | E |
| MORF_RAN | 46 | 268 | 0.171642 | 1.34399E−54 | Neighborhood of RAN | A |
| MODULE_114 | 49 | 338 | 0.14497 | 2.33475E−54 | Genes in the cancer module 114 | E |
| MORF_NME2 | 39 | 154 | 0.253247 | 1.45001E−53 | Neighborhood of NME2 | A |
| GCM_NPM1 | 36 | 116 | 0.310345 | 3.77137E−53 | Neighborhood of NPM1 | E |
| MORF_UBE2I | 43 | 238 | 0.180672 | 4.45899E−52 | Neighborhood of UBE2I | A |
| KEGG_RIBOSOME | 33 | 88 | 0.375 | 4.86486E−52 | Ribosome | E |
| MARTENS_TRETI- | 63 | 841 | 0.074911 | 9.41755E−52 | Genes down-regulated in NB4 | E |
| NOIN_RESPONSE_DN | | | | | cells (acute promyelocytic | |
| | | | | | leukemia, APL) in response to | |
| | | | | | tretinoin <ahref=‘http://pubchem. | |
| | | | | | ncbi.nlm.nih.gov/summary/ | |
| | | | | | summary.cgi?cid=5538’>[Pub | |
| | | | | | Chem=5538]</a>; based on | |
| | | | | | Chip-seq data. | |
| REACTOME_SRP_ | 39 | 170 | 0.229412 | 1.08908E−51 | Genes involved in SRP- | E |
| DEPENDENT _CO- | | | | | dependent cotranslational | |
| TRANSLATIONAL_ | | | | | protein targeting to membrane | |
| PROTEIN_ | | | | | | |
| TARGETING_TO_ | | | | | | |
| MEMBRANE | | | | | | |
| MIPS_RIBOSOME_ | 32 | 81 | 0.395062 | 2.19874E−51 | Ribosome, cytoplasmic | E |
| CYTOPLASMIC | | | | | | |
| DANG_BOUND_BY_ | 68 | 1102 | 0.061706 | 2.10605E−50 | Genes whose promoters are | A |
| MYC | | | | | bound by MYC <ahref=‘http:// | |
| | | | | | www.ncbi.nlm.nih.gov/gene/ | |
| | | | | | 4609’>[GeneID=4609]</a>, | |
| | | | | | according to MYC Target Gene | |
| | | | | | Database. | |
| GRADE_COLON_ | 62 | 870 | 0.071264 | 1.332E−49 | Up-regulated genes in colon | A |
| CANCER_UP | | | | | carcinoma tumors compared | |
| | | | | | to the matched normal mucosa | |
| | | | | | samples. | |
| MIPS_NOP56P_ | 33 | 104 | 0.317308 | 3.72844E−49 | Nop56p-associated pre-rRNA | E |
| ASSOCIATED_PRE_ | | | | | complex | |
| RRNA_COMPLEX | | | | | | |
| GCM_ACTG1 | 34 | 124 | 0.274194 | 4.09074E−48 | Neighborhood of ACTG1 | E |
| REACTOME_TRANS- | 39 | 211 | 0.184834 | 1.09221E−47 | Genes involved in Translation | E |
| LATION | | | | | | |
| MORF_TPT1 | 32 | 102 | 0.313725 | 1.67005E−47 | Neighborhood of TPT1 | E |
| MORF_ANP32B | 38 | 197 | 0.192893 | 3.0616E−47 | Neighborhood of ANP32B | A |
| GNF2_EIF3S6 | 33 | 121 | 0.272727 | 1.23617E−46 | Neighborhood of ElF3S6 | E |
| REACTOME_PACK- | 26 | 48 | 0.541667 | 1.26746E−46 | Genes involved in Packaging | A |
| AGING_OF_TELO- | | | | | Of Telomere Ends | |
| MERE_ENDS | | | | | | |
| CYTOPLASM | 83 | 2130 | 0.038967 | 1.91899E−46 | Genes annotated by the GO | A |
| | | | | | term GO:0005737. All of the | |
| | | | | | contents of a cell excluding | |
| | | | | | the plasma membrane and | |
| | | | | | nucleus, but including other | |
| | | | | | subcellular structures. | |
| REACTOME_INFLU- | 37 | 195 | 0.189744 | 9.97519E−46 | Genes involved in Influenza | E |
| ENZA_LIFE_CYCLE | | | | | Life Cycle | |
| GCM_TPT1 | 28 | 70 | 0.4 | 2.92888E−45 | Neighborhood of TPT1 | E |
| MOOTHA_HUM | 46 | 429 | 0.107226 | 7.82687E−45 | Mitochondrial genes; based | E |
| AN_MITODB_6_2002 | | | | | on literature and sequence | |
| | | | | | annotation resources and | |
| | | | | | converted to Affymetrix HG- | |
| | | | | | U133A probe sets. | |
| REACTOME_DEPOSI- | 27 | 64 | 0.421875 | 1.8209E−44 | Genes involved in Deposition | A |
| TION_OF_NEW_ | | | | | of New CENPA-containing | |
| CENPA_CONTAINING_ | | | | | Nucleosomes at the Centromere | |
| NUCLEOSOM ES_AT_ | | | | | | |
| THE_CENTROMERE | | | | | | |
| MORF_DEK | 39 | 262 | 0.148855 | 8.56568E−44 | Neighborhood of DEK | B |
| STRUCTURAL_ | 28 | 80 | 0.35 | 2.89995E−43 | Genes annotated by the GO | E |
| CONSTITUENT_OF_ | | | | | term GO:0003735. The action | |
| RIBOSOME | | | | | of a molecule that contributes | |
| | | | | | to the structural integrity of the | |
| | | | | | ribosome. | |
| CYTOPLASMIC_PART | 67 | 1383 | 0.048445 | 5.72269E−43 | Genes annotated by the GO | E |
| | | | | | term GO:0044444. Any | |
| | | | | | constituent part of the cytoplasm, | |
| | | | | | all of the contents of a cell | |
| | | | | | excluding the plasma membrane | |
| | | | | | and nucleus, but including | |
| | | | | | other subcellular structures. | |
| REACTOME_MEI | 27 | 71 | 0.380282 | 6.10173E−43 | Genes involved in Meiotic | A |
| OTIC_SYNAPSIS | | | | | Synapsis | |
| REACTOME_INFLU- | 33 | 161 | 0.204969 | 4.5827E−42 | Genes involved in Influenza | E |
| ENZA_VIRAL_RNA_ | | | | | Viral RNA Transcription and | |
| TRANSCRIPTION_ | | | | | Replication | |
| AND_REPLCATION | | | | | | |
| REACTOME_PEPTIDE_ | 32 | 145 | 0.22069 | 6.07377E−42 | Genes involved in Peptide | E |
| CHAIN_ELONGATION | | | | | chain elongation | |
| GNF2_DAP3 | 30 | 119 | 0.252101 | 2.60612E−41 | Neighborhood of DAP3 | F |
| MORF_HDAC1 | 37 | 254 | 0.145669 | 3.2396E−41 | Neighborhood of HDAC1 | B |
| MODULE_32 | 36 | 241 | 0.149378 | 1.56382E−40 | Genes in the cancer module 32 | F |
| REACTOME_TELO- | 26 | 75 | 0.346667 | 4.08693E−40 | Genes involved in Telomere | E |
| MERE_MAINTENANCE | | | | | Maintenance | |
| REACTOME_3_UTR_ | 32 | 166 | 0.192771 | 6.8601E−40 | Genes involved in 3'-UTR- | E |
| MEDIATED_TRANS- | | | | | mediated translational | |
| LATIONAL_REGULA- | | | | | regulation | |
| TION | | | | | | |
| REACTOME_NON- | 32 | 167 | 0.191617 | 8.44451E−40 | Genes involved in Nonsense | E |
| SENSE_MEDIATED_ | | | | | Mediated Decay Enhanced by | |
| DECAY_ENHANCED_ | | | | | the Exon Junction Complex | |
| BY_THE_EXON_ | | | | | | |
| JUNCTION_COMPLEX | | | | | | |

[0115] Table 6 below shows, by letter coding, the relatedness of the pathways for the drugs (Compound B, Tubastatin A, and Compound A) tested in the pathway analysis.

TABLE 6

| | | Code |
|---|---|---|
| in Compound B & Tubastatin A & Compound A | 14 | A |
| in Compound B & Tubastatin A but not Compound A | 2 | B |
| in Tubastatin A & Compound A but not Compound B | 32 | E |
| in Tubastatin A only | 2 | F |

TABLE 7
(Compound A(+))

| Pathway | Observed | Pathway_size | Ratio | P-value | Description | Code |
|---|---|---|---|---|---|---|
| HSIAO_HOUSEKEEP- | 87 | 389 | 0.22365 | 0 | Housekeeping genes identified | A |
| ING_GENES | | | | | as expressed across 19 normal | |
| | | | | | tissues. | |
| REACTOME_RNA_ | 49 | 61 | 0.803279 | 2.77678E−95 | Genes involved in RNA | A |
| POL_I_PROMOTER_ | | | | | Polymerase I Promoter | |
| OPENING | | | | | Opening | |
| REACTOME_MEIOTIC_ | 50 | 84 | 0.595238 | 3.17678E−86 | Genes involved in Meiotic | E |
| RECOMBINATION | | | | | Recombination | |
| REACTOME_RNA_ | 50 | 86 | 0.581395 | 1.82036E−85 | Genes involved in RNA | E |
| POL_I_TRANSCRIP- | | | | | Polymerase I Transcription | |
| TION | | | | | | |
| REACTOME_ | 49 | 81 | 0.604938 | 5.09913E−85 | Genes involved in Amyloids | E |
| AMYLOIDS | | | | | | |
| MORF_NPM1 | 59 | 162 | 0.364198 | 5.95145E−85 | Neighborhood of NPM1 | A |
| KEGG_SYSTEMIC_ | 54 | 139 | 0.388489 | 1.32834E−79 | Systemic lupus erythematosus | E |
| LUPUS_ERYTHE- | | | | | | |
| MATOSUS | | | | | | |
| MORF_ACTG1 | 53 | 138 | 0.384058 | 8.42596E−78 | Neighborhood of ACTG1 | E |
| REACTOME_MEIOSIS | 50 | 112 | 0.446429 | 1.49288E−77 | Genes involved in Meiosis | E |
| REACTOME_RNA_ | 50 | 119 | 0.420168 | 7.42228E−76 | Genes involved in RNA | E |
| POL_I_RNA_POL_III_ | | | | | Polymerase I, RNA | |
| AND_MITOCHONDRI- | | | | | Polymerase III, and | |
| AL_TRANSCRIPTION | | | | | Mitochondrial Transcription | |
| MODULE_83 | 65 | 320 | 0.203125 | 9.3936E−75 | Genes in the cancer module 83 | E |
| MODULE_114 | 64 | 338 | 0.189349 | 1.74872E−71 | Genes in the cancer module 114 | E |
| PUJANA_BRCA1_ | 107 | 1651 | 0.064809 | 1.33441E−70 | Genes constituting the | A |
| PCC _NETWORK | | | | | BRCA1-PCC network of | |
| | | | | | transcripts whose expression | |
| | | | | | positively correlated (Pearson | |
| | | | | | correlation coefficient, PCC ≧ | |
| | | | | | 0.4) with that of BRCA1<ahref= | |
| | | | | | ‘http://www.ncbi.nlm.nih.gov/ | |
| | | | | | gene/672’>[GeneID=672]</a> | |
| | | | | | across a compendium of normal | |
| | | | | | tissues. | |
| CYTOPLASM | 117 | 2130 | 0.05493 | 9.53592E−70 | Genes annotated by the GO | A |
| | | | | | term GO:0005737. All of the | |
| | | | | | contents of a cell excluding the | |
| | | | | | plasma membrane and nucleus, | |
| | | | | | but including other subcellular | |
| | | | | | structures. | |
| MIPS_RIBOSOME_ | 42 | 81 | 0.518519 | 7.22853E−69 | Ribosome, cytoplasmic | E |
| CYTOPLASMIC | | | | | | |
| MODULE_151 | 61 | 318 | 0.191824 | 1.76308E−68 | Genes in the cancer module 151 | E |
| MOOTHA_HUMAN_ | 66 | 429 | 0.153846 | 1.98815E−67 | Mitochondrial genes; based on | E |
| MITODB_6_2002 | | | | | literature and sequence annota- | |
| | | | | | tion resources and converted to | |
| | | | | | Affymetrix HG-U133A probe | |
| | | | | | sets. | |
| REACTOME_METAB- | 69 | 496 | 0.139113 | 2.15041E−67 | Genes involved in Metabolism | E |
| OLISM_OF_PROTEINS | | | | | of proteins | |
| MIPS_NOP56P_ | 44 | 104 | 0.423077 | 5.79581E−67 | Nop56p-associated pre-rRNA | E |
| ASSOCIATED_PRE_ | | | | | complex | |
| RRNA_COMPLEX | | | | | | |
| KEGG_RIBOSOME | 42 | 88 | 0.477273 | 8.20158E−67 | Ribosome | E |
| REACTOME_TRANS- | 53 | 207 | 0.256039 | 8.42324E−67 | Genes involved in Transcription | E |
| CRIPTION | | | | | | |
| MORF_UBE2I | 55 | 238 | 0.231092 | 1.38992E−66 | Neighborhood of UBE2I | A |
| CYTOPLASMIC_PART | 96 | 1383 | 0.069414 | 1.10511E−65 | Genes annotated by the GO term | E |
| | | | | | GO:0044444. Any constituent | |
| | | | | | part of the cytoplasm, all of the | |
| | | | | | contents of a cell excluding the | |
| | | | | | plasma membrane and nucleus, | |
| | | | | | but including other subcellular | |
| | | | | | structures. | |
| REACTOME_PACK- | 35 | 48 | 0.729167 | 1.88442E−65 | Genes involved in Packaging | A |
| AGING_OF_TELO- | | | | | Of Telomere Ends | |
| MERE_ENDS | | | | | | |
| MORF_NME2 | 48 | 154 | 0.311688 | 3.10557E−65 | Neighborhood of NME2 | A |
| DANG_BOUND_BY_ | 88 | 1102 | 0.079855 | 3.8618E−65 | Genes whose promoters are | A |
| MYC | | | | | bound by MYC <ahref=‘http:// | |
| | | | | | www.ncbi.nlm.nih.gov/gene/ | |
| | | | | | 4609’>[GeneID=4609]</a>, | |
| | | | | | according to MYC Target Gene | |
| | | | | | Database. | |
| GCM_TPT1 | 37 | 70 | 0.528571 | 3.55595E−61 | Neighborhood of TPT1 | E |
| MORF_RAN | 53 | 268 | 0.197761 | 3.04985E−60 | Neighborhood of RAN | A |
| REACTOME_SRP_ | 46 | 170 | 0.270588 | 2.87124E−59 | Genes involved in SRP- | E |
| DEPENDENT _CO- | | | | | dependent cotranslational | |
| TRANSLATIONAL_ | | | | | protein targeting to membrane | |
| PROTEIN_TARGET- | | | | | | |
| ING_TO_MEMBRANE | | | | | | |
| MORF_TPT1 | 40 | 102 | 0.392157 | 2.87425E−59 | Neighborhood of TPT1 | E |
| GCM_NPM1 | 41 | 116 | 0.353448 | 1.83552E−58 | Neighborhood of NPM1 | E |
| REACTOME_INFLU | 47 | 195 | 0.241026 | 6.91736E−58 | Genes involved in Influenza | E |
| ENZA_LIFE_CYCLE | | | | | Life Cycle | |
| REACTOME_TRANS- | 48 | 211 | 0.227488 | 8.99426E−58 | Genes involved in Translation | E |
| LATION | | | | | | |
| GRADE_COLON_ | 75 | 870 | 0.086207 | 1.10441E−57 | Up-regulated genes in colon | A |
| CANCER_UP | | | | | carcinoma tumors compared to | |
| | | | | | the matched normal mucosa | |
| | | | | | samples. | |
| GNF2_EIF3S6 | 41 | 121 | 0.338843 | 1.47035E−57 | Neighborhood of EIF3S6 | E |
| REACTOME_TELO- | 36 | 75 | 0.48 | 1.73836E−57 | Genes involved in Telomere | E |
| MERE_MAINTE- | | | | | Maintenance | |
| NANCE | | | | | | |
| REACTOME_MEIO- | 35 | 71 | 0.492958 | 1.86284E−56 | Genes involved in Meiotic | A |
| TIC_SYNAPSIS | | | | | Synapsis | |
| REACTOME_DEPOSI- | 34 | 64 | 0.53125 | 2.19681E−56 | Genes involved in Deposition | A |
| TION_OF_NEW_ | | | | | of New CENPA-containing | |
| CENPA_CONTAIN- | | | | | Nucleosomes at the Centromere | |
| ING_NUCLEOSOMES_ | | | | | | |
| AT_THE_CENTRO- | | | | | | |
| MERE | | | | | | |
| REACTOME_3_UTR_ | 43 | 166 | 0.259036 | 1.62802E−54 | Genes involved in 3′-UTR- | E |
| MEDIATED_TRANS- | | | | | mediated translational | |
| LATIONAL_REGULA- | | | | | regulation | |
| TION | | | | | | |
| REACTOME_PEPTIDE_ | 41 | 145 | 0.282759 | 8.72138E−54 | Genes involved in Peptide | E |
| CHAIN_ELONGATION | | | | | chain elongation | |
| REACTOME_INFLU- | 42 | 161 | 0.26087 | 2.08571E−53 | Genes involved in Influenza | E |
| ENZA_VIRAL_RNA_ | | | | | Viral RNA Transcription and | |
| TRANSCRIPTION_ | | | | | Replication | |
| AND_REPLICATION | | | | | | |
| MOOTHA_MITO- | 57 | 447 | 0.127517 | 2.18748E−53 | Mitochondrial genes | G |
| CHONDRIA | | | | | | |
| GCM_ACTG1 | 39 | 124 | 0.314516 | 2.72657E−53 | Neighborhood of ACTG1 | E |
| BLALOCK_ALZHEI- | 81 | 1237 | 0.065481 | 4.17496E−53 | Genes down-regulated in brain | C |
| MERS_DISEASE_DN | | | | | from patients with Alzheimer's | |
| | | | | | disease. | |
| MARTENS_TRETI- | 69 | 841 | 0.082045 | 1.51166E−51 | Genes down-regulated in NB4 | E |
| NOIN_RESPONSE_DN | | | | | cells (acute promyelocytic | |
| | | | | | leukemia, APL) in response to | |
| | | | | | tretinoin <ahref=‘http://pubchem. | |
| | | | | | ncbi.nlm.nih.gov/summary/ | |
| | | | | | summary.cgi?cid=5538’>[Pub | |
| | | | | | Chem=5538]</a>; based on | |
| | | | | | Chip-seq data. | |
| KIM_BIPOLAR_ | 64 | 681 | 0.093979 | 1.83662E−51 | Genes whose expression | C |
| DISORDER_OLIG- | | | | | significantly and positively | |
| ODENDROCYTE_ | | | | | correlated with oligodendrocyte | |
| DENSITY_CORR_UP | | | | | density in layer VI of BA9 brain | |
| | | | | | region in patients with bipolar | |
| | | | | | disorder. | |
| KRCTCNNNNMA- | 32 | 66 | 0.484848 | 2.20314E−51 | Genes with promoter regions | G |
| NAGC_UNKNOWN | | | | | [−2kb,2kb] around transcription | |
| | | | | | start site containing motif | |
| | | | | | KRCTCNNNNMANAGC. | |
| | | | | | Motif does not match any known | |
| | | | | | transcription factor | |
| MORF_ANP32B | 43 | 197 | 0.218274 | 5.84661E−51 | Neighborhood of ANP32B | A |
| REACTOME_NON- | 41 | 167 | 0.245509 | 6.15053E−51 | Genes involved in Nonsense | E |
| SENSE_MEDIATED_ | | | | | Mediated Decay Enhanced by | |
| DECAY_ENHANCED_ | | | | | the Exon Junction Complex | |
| BY_THE_EXON_ | | | | | | |
| JUNCTION_COMPLEX | | | | | | |
| STRUCTURAL_ | 33 | 80 | 0.4125 | 5.97757E−50 | Genes annotated by the GO | E |
| CONSTITUENT_OF_ | | | | | term GO:0003735. The action | |
| RIBOSOME | | | | | of a molecule that contributes | |
| | | | | | to the structural integrity of the | |
| | | | | | ribosome. | |

[0116] Table 8 below shows, by letter coding, the relatedness of the pathways for the drugs (Compound B, Tubastatin A, and Compound A) tested in the pathway analysis.

TABLE 8

| | | Code |
|---|---|---|
| in Compound B & Tubastatin A & Compound A | 14 | A |
| In Compound B & Compound A but not Tubastatin A | 2 | C |
| in Tubastatin A & Compound A but not Compound B | 32 | E |
| in Compound A only | 2 | G |

### Example 4

### Analysis of Total Peptide (Including Both Acetylated and Unacetylated) Amount in Compound B Treated Cell Lysate

[0117] The SILAC method was performed as described in Example 1. The Compound B- (¹²C-lysine labeled) and DMSO-treated (¹³C-lysine labeled) cells were lysed with 2% SDS at 97° C. for 5 min. The samples were sonicated using a high intensity ultrasonic processor, and centrifuged at 20,000 g at 4° C. for 15 min to remove remaining debris. Protein content in the supernatant was determined with a BCA assay kit (Thermo Fisher, Waltham, Mass.) according to the manufacturer's instructions. 25 μg of crude protein from each sample was mixed and separated by 12% SDS-PAGE. After electrophoresis, the gel was stained with Coomassie Blue. The entire gel lane was cut into 20 slices and digested with trypsin. The gel bands were cut into small cubes of 1 mm³ that were washed with 500 μl of H₂O followed by 500 μl of 50% ethanol overnight on a mixer. The gel pieces were dehydrated by the addition of 500 μl of acetonitrile. Supernatant was discarded and the gel pieces were vacuum-dried. Disulfide bonds were cleaved by incubating the gels for 1 hr at 56° C. with 200 μl of 10 mM DTT in 50 mM ammonium bicarbonate buffer. Alkylation of cysteines was performed by incubating the gels for 45 min at room temperature in darkness with 200 μl of 55 mM iodoacetamide in 50 mM ammonium bicarbonate buffer. The gel pieces were dehydrated and vacuum-dried again. Gel pieces were covered with trypsin solution (10 ng/μl in 50 mM ammonium bicarbonate buffer). After a 30-min incubation at 4° C., the remaining trypsin solution was removed, and 50 mM ammonium bicarbonate was added to prevent the gels from drying during overnight digestion at 37° C. The peptides in the gels were extracted once by 200 μl 5% TFA in 50% acetonitrile and twice by 200 μl 100% acetonitrile. All the supernatant was combined and vacuum-dried followed by mass spectrometer analysis.

[0118] The results of this experiment for Compound B treated cells are shown in Table 9 below. These results show the total peptide (acetylated and unacetylated) amounts in Compound B treated cell lysate. The data shows which peptide levels changed upon treatment with Compound B, regardless of their acetylation status.

[0119] The first column of Table 9 shows the name of the gene for the identified peptides.

[0120] The second column of Table 9 shows the ratio of light to heavy peptides, after normalization.

[0121] The third column of Table 9 shows the median value of the amount of change, which was determined from the ratio of light to heavy peptides, after normalization (the second column). It is important to note that if the median value for the fold of change was less than 1.3, then the fourth column and the fifth column are blank (data is not shown) because the peptides identified were not of interest.

[0122] The fourth column of Table 9 shows that the fold of change transitions from a decrease, at the top of the table, to an increase, at the top of the table.

[0123] The fifth column of Table 9 shows the peptide sequences of each peptide identified.

Lengthy table referenced here
US20140357512A1-20141204-T00001
Please refer to the end of the specification for access instructions.

### Example 5

### Synthesis of 2-(diphenylamino)-N-(7-(hydroxyamino)-7-oxoheptyl)pyrimidine-5-carboxamide (Compound A)

[chemical structure]

[chemical structure]

### Synthesis of Intermediate 2

[chemical structure]

[0126] A mixture of aniline (3.7 g, 40 mmol), ethyl 2-chloropyrimidine-5-carboxylate 1 (7.5 g, 40 mmol), K₂CO₃ (11 g, 80 mmol) in DMF (100 ml) was degassed and stirred at 120° C. under N₂ overnight. The reaction mixture was cooled to rt and diluted with EtOAc (200 ml), then washed with saturated brine (200 ml×3). The organic layer was separated and dried over Na₂SO₄, evaporated to dryness and purified by silica gel chromatography (petroleum ethers/EtOAc=10/1) to give the desired product as a white solid (6.2 g, 64%).

### Synthesis of Intermediate 3

[chemical structure]

[0128] A mixture of the compound 2 (6.2 g, 25 mmol), iodobenzene (6.12 g, 30 mmol), CuI (955 mg, 5.0 mmol), Cs₂CO₃ (16.3 g, 50 mmol) in TEOS (200 ml) was degassed and purged with nitrogen. The resulting mixture was stirred at 140° C. for 14 h. After cooling to rt, the residue was diluted with EtOAc (200 ml) and 95% EtOH (200 ml), NH₄F—H₂O on silica gel [50 g, pre-prepared by the addition of NH₄F (100 g) in water (1500 ml) to silica gel (500 g, 100-200 mesh)] was added, and the resulting mixture was kept at rt for 2 h, the solidified materials was filtered and washed with EtOAc. The filtrate was evaporated to dryness and the residue was purified by silica gel chromatography (petroleum ethers/EtOAc=10/1) to give a yellow solid (3 g, 38%).

### Synthesis of Intermediate 4

[chemical structure]

[0130] 2N NaOH (200 ml) was added to a solution of the compound 3 (3.0 g, 9.4 mmol) in EtOH (200 ml). The mixture was stirred at 60° C. for 30 min. After evaporation of the solvent, the solution was neutralized with 2N HCl to give a white precipitate. The suspension was extracted with EtOAc (2×200 ml), and the organic layer was separated, washed with water (2×100 ml), brine (2×100 ml), and dried over Na₂SO₄. Removal of solvent gave a brown solid (2.5 g, 92%).

### Synthesis of Intermediate 6

[chemical structure]

[0132] A mixture of compound 4 (2.5 g, 8.58 mmol), aminoheptanoate 5 (2.52 g, 12.87 mmol), HATU (3.91 g, 10.30 mmol), DIPEA (4.43 g, 34.32 mmol) was stirred at rt overnight. After the reaction mixture was filtered, the filtrate was evaporated to dryness and the residue was purified by silica gel chromatography (petroleum ethers/EtOAc=2/1) to give a brown solid (2 g, 54%).

### Synthesis of 2-(diphenylamino)-N-(7-(hydroxyamino)-7-oxoheptyl)pyrimidine-5-carboxamide

[chemical structure]

[0134] A mixture of the compound 6 (2.0 g, 4.6 mmol), sodium hydroxide (2N, 20 mL) in MeOH (50 ml) and DCM (25 ml) was stirred at 0° C. for 10 min. Hydroxylamine (50%) (10 ml) was cooled to 0° C. and added to the mixture. The resulting mixture was stirred at rt for 20 min. After removal of the solvent, the mixture was neutralized with 1M HCl to give a white precipitate. The crude product was filtered and purified by pre-HPLC to give a white solid (950 mg, 48%).

### Example 6

### Synthesis of 2-((1-(3-fluorophenyl)cyclohexyl)amino)-N-hydroxypyrimidine-5-carboxamide (Compound B)

[chemical structure]

### Synthesis of 1-(3-fluorophenyl)cyclohexanecarbonitrile

[0136] To a solution of 2-(3-fluorophenyl)acetonitrile (100 g, 0.74 mol) in Dry DMF (1000 ml) was added 1,5-dibromopentane (170 g, 0.74 mol), and NaH (65 g, 2.2 eq) was added dropwise at ice bath. After addition, the resulting mixture was vigorously stirred overnight at 50° C. The suspension was quenched by ice water carefully, and extracted with ethyl acetate (3*500 ml). The combined organic solution was concentrated to afford the crude, which was purified on a flash column, to give 1-(3-fluorophenyl)cyclohexanecarbonitrile as a pale solid (100 g, 67%).

### Synthesis of 1-(3-fluorophenyl)cyclohexanecarboxamide

[0137] A solution of 1-(3-fluorophenyl)cyclohexanecarbonitrile (100 g, 0.49 mol) in PPA (500 ml) was heated at 110° C. for about 5-6 hours. After completion, the resulting mixture was carefully basified with sat.NaHCO3 soultion until pH=8-9. The precipitate was collected and washed with water (1000 ml) to afford 1-(3-fluorophenyl)cyclohexanecarboxamide as a white solid (95 g, 87%).

### Synthesis of 1-(3-fluorophenyl)cyclohexanamine

[0138] To a solution of 1-(3-fluorophenyl)cyclohexanecarboxamide (95 g, 0.43 mol) in n-BuOH (800 ml) was added NaClO (260 ml, 1.4 eq), then 3N NaOH (400 ml, 2.8 eq) was added at 0° C., and the reaction was stirred overnight at r.t. The resulting mixture was extracted with EA (2*500 ml), and the combined organic solution was washed with brine, and then dried to afford the crude, which was further purified on treating with HCl salt, as a white powder (72 g, 73%).

### Synthesis of ethyl 2-(1-(3-fluorophenyl)cyclohexylamino)pyrimidine-5-carboxylate

[0139] To a solution of 1-(3-fluorophenyl)cyclohexanamine hydrochloride (2.29 g 10 mmol) in Dioxane (50 ml) was added ethyl 2-chloropyrimidine-5-carboxylate (1.87 g, 1.0 eq) and DIPEA (2.58 g, 2.0 eq). The mixture was heated overnight at 110-120° C. The resulting mixture was directly purified on a silica gel column to afford the coupled product as a white solid (1.37 g, 40%).

### Synthesis of Compound B

[0140] To a solution of ethyl 2-(1-(3-fluorophenyl)cyclohexylamino)pyrimidine-5-carboxylate (100 mg, 0.29 mmol) in MeOH/DCM (10 ml, 1:1) was added 50% NH₂OH in water (2 ml, excess), then sat. NaOH in MeOH (2 ml, excess) was added at 0° C., and the reaction was stirred for 3-4 hours. After completion, the resulting mixture was concentrated, and acidified with 2N HCl to pH=4-5. The precipitate was collected, washed with water (10 ml) to remove the NH₂OH, and dried to afford Compound B as a white powder (70 mg, 73%).

LENGTHY TABLES
The patent application contains a lengthy table section. A copy of the table is available in electronic form from the USPTO web site (http://seqdata.uspto.gov/?pageRequest=docDetail&DocID=US20140357512A1). An electronic copy of the table will also be available from the USPTO upon request and payment of the fee set forth in 37 CFR 1.19(b)(3).

What is claimed is:

1. A Compound B specific histone deacetylase 6 (HDAC6) biomarker peptide, which is acetylated, for multiple myeloma comprising an amino acid sequence selected from the group consisting of SEQ ID NOs: 1-18, and 323-490.

2. A Tubastatin A specific histone deacetylase 6 (HDAC6) biomarker peptide, which is acetylated, for multiple myeloma comprising an amino acid sequence selected from the group consisting of SEQ ID NOs: 1-322.

3. A joint Compound B and Tubastatin A specific histone deacetylase 6 (HDAC6) biomarker peptide, which is acetylated, for multiple myeloma comprising an amino acid sequence selected from the group consisting of SEQ ID NOs: 1-18.

4. A Compound A specific histone deacetylase (HDAC) biomarker peptide, which is acetylated, for multiple myeloma comprising an amino acid sequence selected from the group consisting of SEQ ID NOs: 12-18, 245-322, and 476-817.

5. A Compound B specific histone deacetylase 6 (HDAC6) biomarker peptide, which is acetylated or unacetylated, for multiple myeloma comprising an amino acid sequence selected from the group consisting of SEQ ID NOs: 818-15721.

6. A kit comprising an anti-acetylated lysine antibody and instructions for identifying an acetylated biomarker peptide comprising an amino acid sequence selected from the group consisting of SEQ ID NOs: 1-817.

7. A kit comprising a detection agent and instructions for identifying an acetylated or unacetylated biomarker peptide comprising an amino acid sequence selected from the group consisting of SEQ ID NOs: 818-15721.

8. A method for monitoring the treatment efficiency of a histone deacetylase (HDAC) inhibitor in a subject comprising:
a) administering a therapeutically effective amount of an HDAC inhibitor to a subject;
b) taking a biological sample from the subject;
c) determining whether an HDAC biomarker peptide comprising an amino acid sequence selected from the group consisting of SEQ ID NOs: 1-15721 is present in the sample; and
d) concluding that the HDAC treatment is efficient if an HDAC biomarker peptide comprising an amino acid sequence selected from the group consisting of SEQ ID NOs: 1-15721 is present in the sample, and concluding that the HDAC treatment is not efficient if an HDAC biomarker peptide comprising an amino acid sequence selected from the group consisting of SEQ ID NOs: 1-15721 is not present in the sample.

9. The method of claim 8, wherein the HDAC inhibitor is selected from the group consisting of: Compound A, Compound B, and Tubastatin A.

10. The method of claim 8, wherein the HDAC inhibitor is an HDAC6 inhibitor.

11. The method of claim 10, wherein the HDAC6 inhibitor is selected from the group consisting of Compound B, and Tubastatin A.

12. The method of claim 8, wherein the sample is a bone marrow sample.

13. The method of claim 8, wherein the determining step utilizes an antibody.

The application's sequence listing, which the Patent Office published only in electronic form, follows.

SEQUENCE LISTING (15727 sequences)

SEQ ID NO: 1 - protein, 10 aa, Homo sapiens
  MOD_RES (2)..(2): Lys(Ac)
FKESFAEMNR

SEQ ID NO: 2 - protein, 9 aa, Homo sapiens
  MOD_RES (4)..(4): Lys(Ac)
ELNKILEGR

SEQ ID NO: 3 - protein, 16 aa, Homo sapiens
  MOD_RES (7)..(7): Lys(Ac)
AAEVLNKHSLSGRPLK

SEQ ID NO: 4 - protein, 13 aa, Homo sapiens
  MOD_RES (3)..(3): Lys(Ac)
LYKEELEQTYHAK

SEQ ID NO: 5 - protein, 13 aa, Homo sapiens
  MOD_RES (7)..(7): Lys(Ac)
  MOD_RES (12)..(12): Lys(Ac)
TLVLSDKHSPQKK

SEQ ID NO: 6 - protein, 14 aa, Homo sapiens
  N-term Ac
  MOD_RES (11)..(11): Lys(Ac)
CNTPTYCDLGKAAK

SEQ ID NO: 7 - protein, 15 aa, Homo sapiens
  MOD_RES (7)..(7): Lys(Ac)
LGTDESKFNAVLCSR

SEQ ID NO: 8 - protein, 11 aa, Homo sapiens
  MOD_RES (7)..(7): Lys(Ac)
SFDSEFKLACK

SEQ ID NO: 9 - protein, 10 aa, Homo sapiens
  MOD_RES (7)..(7): Lys(Ac)
EPVAVLKANR

SEQ ID NO: 10 - protein, 9 aa, Homo sapiens
  MOD_RES (3)..(3): Lys(Ac)
LNKDQWEER

SEQ ID NO: 11 - protein, 21 aa, Homo sapiens
  MOD_RES (13)..(13): Lys(Ac)
DFLAGGVAAAISKTAVAPIER

SEQ ID NO: 12 - protein, 9 aa, Homo sapiens
  MOD_RES (4)..(4): Lys(Ac)
YYNKYINVK

SEQ ID NO: 13 - protein, 10 aa, Homo sapiens
  MOD_RES (3)..(3): Lys(Ac)
  MOD_RES (5)..(5): Lys(Ac)
TNKNKSSISR

SEQ ID NO: 14 - protein, 10 aa, Homo sapiens
  MOD_RES (3)..(3): Lys(Ac)
  MOD_RES (5)..(5): Lys(Ac)
TSKNKSSLSR

SEQ ID NO: 15 - protein, 11 aa, Homo sapiens
  MOD_RES (4)..(4): Lys(Ac)
  MOD_RES (7)..(7): Lys(Ac)
AGGKAGKDSGK

SEQ ID NO: 16 - protein, 12 aa, Homo sapiens
  MOD_RES (5)..(5): Lys(Ac)
  MOD_RES (11)..(11): Lys(Ac)
PDPAKSAPAPKK

SEQ ID NO: 17 - protein, 14 aa, Homo sapiens
  MOD_RES (6)..(6): Lys(Ac)
  MOD_RES (11)..(11): Lys(Ac)
YLTNQKNSNSKNDR

SEQ ID NO: 18 - protein, 20 aa, Homo sapiens
  MOD_RES (8)..(8): Lys(Ac)
GVTQFGNKYIQQTKPLTLER

SEQ ID NO: 19 - protein, 13 aa, Homo sapiens
  MOD_RES (10)..(10): Lys(Ac)
IHNFGLIQEKLAR

SEQ ID NO: 20 - protein, 9 aa, Homo sapiens
  MOD_RES (7)..(7): Lys(Ac)
LDHLAEKFR

SEQ ID NO: 21 - protein, 12 aa, Homo sapiens
  MOD_RES (2)..(2): Lys(Ac)
LKDISTLEPLKK

SEQ ID NO: 22 - protein, 15 aa, Homo sapiens
  MOD_RES (10)..(10): Lys(Ac)
QRQEVCQSYKSLYGK

SEQ ID NO: 23 - protein, 15 aa, Homo sapiens
  MOD_RES (5)..(5): Lys(Ac)
MYFDKYVLKPATEGK

SEQ ID NO: 24 - protein, 10 aa, Homo sapiens
  MOD_RES (6)..(6): Lys(Ac)
IVEYEKEMEK

SEQ ID NO: 25 - protein, 18 aa, Homo sapiens
  MOD_RES (7)..(7): Lys(Ac)
FYGDEEKDKGLQTSQDAR

SEQ ID NO: 26 - protein, 13 aa, Homo sapiens
  MOD_RES (12)..(12): Lys(Ac)
ALEHFTDLYDIKR

SEQ ID NO: 27 - protein, 21 aa, Homo sapiens
  MOD_RES (14)..(14): Lys(Ac)
KYEFSPQTLCCYGKQLCTIPR

SEQ ID NO: 28 - protein, 9 aa, Homo sapiens
  MOD_RES (3)..(3): Lys(Ac)
ALKDLYCHK

SEQ ID NO: 29 - protein, 13 aa, Homo sapiens
  MOD_RES (5)..(5): Lys(Ac)
LYCPKCMDVYTPK

SEQ ID NO: 30 - protein, 14 aa, Homo sapiens
  MOD_RES (2)..(2): Lys(Ac)
FKDPNCVGTVLASR

SEQ ID NO: 31 - protein, 16 aa, Homo sapiens
  MOD_RES (7)..(7): Lys(Ac)
APTIVGKSSLNPILFR

SEQ ID NO: 32 - protein, 14 aa, Homo sapiens
  MOD_RES (3)..(3): Lys(Ac)
FEKNFYVEHPEVAR

SEQ ID NO: 33 - protein, 11 aa, Homo sapiens
  MOD_RES (8)..(8): Lys(Ac)
DWVLNEFKHGK

SEQ ID NO: 34 - protein, 10 aa, Homo sapiens
  MOD_RES (7)..(7): Lys(Ac)
FGNPGEKLVK

SEQ ID NO: 35 - protein, 9 aa, Homo sapiens
  MOD_RES (3)..(3): Lys(Ac)
VVKHPIFER

SEQ ID NO: 36 - protein, 10 aa, Homo sapiens
  MOD_RES (9)..(9): Lys(Ac)
TCEESSFCKR

SEQ ID NO: 37 - protein, 14 aa, Homo sapiens
  MOD_RES (8)..(8): Lys(Ac)
ASGLAAGKGVIVAK

SEQ ID NO: 38 - protein, 16 aa, Homo sapiens
  MOD_RES (7)..(7): Lys(Ac)
IIVDELKQEVISTSSK

SEQ ID NO: 39 - protein, 11 aa, Homo sapiens
  MOD_RES (3)..(3): Lys(Ac)
LVKVWNLANCK

SEQ ID NO: 40 - protein, 7 aa, Homo sapiens
  N-term Ac
  MOD_RES (6)..(6): Lys(Ac)
AHYNFKK

SEQ ID NO: 41 - protein, 12 aa, Homo sapiens
  MOD_RES (7)..(7): Lys(Ac)
GQQQVFKGLNDK

SEQ ID NO: 42 - protein, 14 aa, Homo sapiens
  MOD_RES (1)..(1): Lys(Ac)
KHPDSSVNFAEFSK

SEQ ID NO: 43 - protein, 15 aa, Homo sapiens
  MOD_RES (9)..(9): Lys(Ac)
RGEEGHDPKEPEQLR

SEQ ID NO: 44 - protein, 16 aa, Homo sapiens
  MOD_RES (11)..(11): Lys(Ac)
AFITNIPFDVKWQSLK

SEQ ID NO: 45 - protein, 7 aa, Homo sapiens
  MOD_RES (2)..(2): Lys(Ac)
VKVLFVR

SEQ ID NO: 46 - protein, 13 aa, Homo sapiens
  MOD_RES (10)..(10): Lys(Ac)
GYFEYIEENKYSR

SEQ ID NO: 47 - protein, 14 aa, Homo sapiens
  MOD_RES (6)..(6): Lys(Ac)
TTWVTKHAAENPGK

SEQ ID NO: 48 - protein, 12 aa, Homo sapiens
  MOD_RES (5)..(5): Lys(Ac)
EELVKNLGTIAK

SEQ ID NO: 49 - protein, 14 aa, Homo sapiens
  MOD_RES (12)..(12): Lys(Ac)
ELISNASDALDKIR

SEQ ID NO: 50 - protein, 10 aa, Homo sapiens
  MOD_RES (7)..(7): Lys(Ac)
ETLQQHKLLK

SEQ ID NO: 51 - protein, 12 aa, Homo sapiens
  MOD_RES (5)..(5): Lys(Ac)
IADDKYNDTFWK

SEQ ID NO: 52 - protein, 7 aa, Homo sapiens
  MOD_RES (2)..(2): Lys(Ac)
NKEIFLR

SEQ ID NO: 53 - protein, 17 aa, Homo sapiens
  MOD_RES (16)..(16): Lys(Ac)
IINEPTAAAIAYGLDKR

SEQ ID NO: 54 - protein, 16 aa, Homo sapiens
  MOD_RES (15)..(15): Lys(Ac)
NQLTSNPENTVFDAKR

SEQ ID NO: 55 - protein, 16 aa, Homo sapiens
  MOD_RES (15)..(15): Lys(Ac)
NQVAMNPTNTVFDAKR

SEQ ID NO: 56 - protein, 18 aa, Homo sapiens
  MOD_RES (15)..(15): Lys(Ac)
YAASSYLSLTPEQWKSHR

SEQ ID NO: 57 - protein, 10 aa, Homo sapiens
  MOD_RES (6)..(6): Lys(Ac)
IHLEIKQLNR

SEQ ID NO: 58 - protein, 18 aa, Homo sapiens
  MOD_RES (13)..(13): Lys(Ac)
LYKEELEQTYHAKLENAR

SEQ ID NO: 59 - protein, 11 aa, Homo sapiens
  MOD_RES (5)..(5): Lys(Ac)
GFGYKGSCFHR

SEQ ID NO: 60 - protein, 9 aa, Homo sapiens
  MOD_RES (8)..(8): Lys(Ac)
ICCQFDFKR

SEQ ID NO: 61 - protein, 21 aa, Homo sapiens
  MOD_RES (8)..(8): Lys(Ac)
ADKDYHFKVDNDENEHQLSLR

SEQ ID NO: 62 - protein, 10 aa, Homo sapiens
  MOD_RES (6)..(6): Lys(Ac)
FINYVKNCFR

SEQ ID NO: 63 - protein, 13 aa, Homo sapiens
  MOD_RES (9)..(9): Lys(Ac)
SGVGNVFIKNLDK

SEQ ID NO: 64 - protein, 12 aa, Homo sapiens
  MOD_RES (3)..(3): Lys(Ac)
GEKFVMQEEFSR

SEQ ID NO: 65 - protein, 11 aa, Homo sapiens
  MOD_RES (7)..(7): Lys(Ac)
PSHLTNKFEDK

SEQ ID NO: 66 - protein, 13 aa, Homo sapiens
  MOD_RES (10)..(10): Lys(Ac)
YGVSGYPTLKIFR

SEQ ID NO: 67 - protein, 11 aa, Homo sapiens
  MOD_RES (5)..(5): Lys(Ac)
SLLGKDVLFLK

SEQ ID NO: 68 - protein, 15 aa, Homo sapiens
  MOD_RES (6)..(6): Lys(Ac)
SIYGEKFEDENFILK

SEQ ID NO: 69 - protein, 17 aa, Homo sapiens
  MOD_RES (4)..(4): Lys(Ac)
TVPKTVDNFVALATGEK

SEQ ID NO: 70 - protein, 12 aa, Homo sapiens
  MOD_RES (8)..(8): Lys(Ac)
VIFGLFGKTVPK

SEQ ID NO: 71 - protein, 14 aa, Homo sapiens
  MOD_RES (3)..(3): Lys(Ac)
VIKDFMIQGGDFTR

SEQ ID NO: 72 - protein, 10 aa, Homo sapiens
  MOD_RES (9)..(9): Lys(Ac)
IYGFYDECKR

SEQ ID NO: 73 - protein, 16 aa, Homo sapiens
  MOD_RES (6)..(6): Lys(Ac)
EIDSVKYLECSALTQR

SEQ ID NO: 74 - protein, 14 aa, Homo sapiens
  N-term Ac
  MOD_RES (3)..(3): Lys(Ac)
ADKEAAFDDAVEER

SEQ ID NO: 75 - protein, 10 aa, Homo sapiens
  MOD_RES (8)..(8): Lys(Ac)
ACFYNLDKFR

SEQ ID NO: 76 - protein, 18 aa, Homo sapiens
  MOD_RES (10)..(10): Lys(Ac)
LGLGEGAEEKSIPTLISR

SEQ ID NO: 77 - protein, 9 aa, Homo sapiens
  MOD_RES (7)..(7): Lys(Ac)
TGCIGAKHR

SEQ ID NO: 78 - protein, 14 aa, Homo sapiens
  MOD_RES (5)..(5): Lys(Ac)
WFQQKYDGIILPGK

SEQ ID NO: 79 - protein, 12 aa, Homo sapiens
  MOD_RES (10)..(10): Lys(Ac)
IFAPNHVVAKSR

SEQ ID NO: 80 - protein, 8 aa, Homo sapiens
  MOD_RES (5)..(5): Lys(Ac)
IEHIKHSK

SEQ ID NO: 81 - protein, 7 aa, Homo sapiens
  MOD_RES (3)..(3): Lys(Ac)
YLKYLTK

SEQ ID NO: 82 - protein, 13 aa, Homo sapiens
  MOD_RES (5)..(5): Lys(Ac)
INFDKYHPGYFGK

SEQ ID NO: 83 - protein, 12 aa, Homo sapiens
  MOD_RES (7)..(7): Lys(Ac)
FIDTTSKFGHGR

SEQ ID NO: 84 - protein, 14 aa, Homo sapiens
  MOD_RES (5)..(5): Lys(Ac)
AASLKSNYNLPMHK

SEQ ID NO: 85 - protein, 14 aa, Homo sapiens
  MOD_RES (5)..(5): Lys(Ac)
LNILKLAPGGHVGR

SEQ ID NO: 86 - protein, 9 aa, Homo sapiens
  MOD_RES (6)..(6): Lys(Ac)
NFLGEKYIR

SEQ ID NO: 87 - protein, 13 aa, Homo sapiens
  MOD_RES (11)..(11): Lys(Ac)
VANVSLLALYKGK

SEQ ID NO: 88 - protein, 8 aa, Homo sapiens
  MOD_RES (5)..(5): Lys(Ac)
LAVLKYYK

SEQ ID NO: 89 - protein, 12 aa, Homo sapiens
  MOD_RES (2)..(2): Lys(Ac)
LKYALTGDEVKK

SEQ ID NO: 90 - protein, 8 aa, Homo sapiens
  MOD_RES (4)..(4): Lys(Ac)
SFQKIQVR

SEQ ID NO: 91 - protein, 11 aa, Homo sapiens
  MOD_RES (8)..(8): Lys(Ac)
ELLTLDEKDPR

SEQ ID NO: 92 - protein, 12 aa, Homo sapiens
  MOD_RES (7)..(7): Lys(Ac)
LQTQVFKLGLAK

SEQ ID NO: 93 - protein, 11 aa, Homo sapiens
  N-term Ac
  MOD_RES (9)..(9): Lys(Ac)
ATETVELHKLK

SEQ ID NO: 94 - protein, 11 aa, Homo sapiens
  MOD_RES (5)..(5): Lys(Ac)
LAELKQECLAR

SEQ ID NO: 95 - protein, 10 aa, Homo sapiens
  MOD_RES (6)..(6): Lys(Ac)
ANLVFKEIEK

SEQ ID NO: 96 - protein, 9 aa, Homo sapiens
  MOD_RES (8)..(8): Lys(Ac)
EGQNWLEKK

SEQ ID NO: 97 - protein, 10 aa, Homo sapiens
  MOD_RES (6)..(6): Lys(Ac)
GFGFIKLESR

SEQ ID NO: 98 - protein, 15 aa, Homo sapiens
  MOD_RES (4)..(4): Lys(Ac)
LFAKYGEPGEVFINK

SEQ ID NO: 99 - protein, 13 aa, Homo sapiens
  MOD_RES (11)..(11): Lys(Ac)
YGEPGEVFINKGK

SEQ ID NO: 100 - protein, 20 aa, Homo sapiens
  MOD_RES (14)..(14): Lys(Ac)
YIYDSAFHPDTGEKMILIGR

SEQ ID NO: 101 - protein, 15 aa, Homo sapiens
  MOD_RES (10)..(10): Lys(Ac)
LVESLPQEIKANVAK

SEQ ID NO: 102 - protein, 12 aa, Homo sapiens
  MOD_RES (4)..(4): Lys(Ac)
AFFKGAWSNVLR

SEQ ID NO: 103 - protein, 14 aa, Homo sapiens
  MOD_RES (12)..(12): Lys(Ac)
YFPTQALNFAFKDK

SEQ ID NO: 104 - protein, 10 aa, Homo sapiens
  MOD_RES (4)..(4): Lys(Ac)
TWEKLLLAAR

SEQ ID NO: 105 - protein, 12 aa, Homo sapiens
  MOD_RES (11)..(11): Lys(Ac)
YLMEEDEDAYKK

SEQ ID NO: 106 - protein, 13 aa, Homo sapiens
  MOD_RES (12)..(12): Lys(Ac)
TVFAEHISDECKR

SEQ ID NO: 107 - protein, 15 aa, Homo sapiens
  MOD_RES (10)..(10): Lys(Ac)
TKDIEDVFYKYGAIR

SEQ ID NO: 108 - protein, 11 aa, Homo sapiens
  N-term Ac
  MOD_RES (9)..(9): Lys(Ac)
AEPSAPESKHK

SEQ ID NO: 109 - protein, 16 aa, Homo sapiens
  MOD_RES (12)..(12): Lys(Ac)
INVYYNEATGGKYVPR

SEQ ID NO: 110 - protein, 11 aa, Homo sapiens
  MOD_RES (9)..(9): Lys(Ac)
ILAEGGGAKFK

SEQ ID NO: 111 - protein, 18 aa, Homo sapiens
  MOD_RES (5)..(5): Lys(Ac)
QIESKTAFQEALDAAGDK

SEQ ID NO: 112 - protein, 15 aa, Homo sapiens
  MOD_RES (10)..(10): Lys(Ac)
LFKPGQEAVKYQGPR

SEQ ID NO: 113 - protein, 21 aa, Homo sapiens
  MOD_RES (5)..(5): Lys(Ac)
VYVAKVDCTAHSDVCSAQGVR

SEQ ID NO: 114 - protein, 14 aa, Homo sapiens
  MOD_RES (5)..(5): Lys(Ac)
VVVTKYCDPDSYHR

SEQ ID NO: 115 - protein, 18 aa, Homo sapiens
  MOD_RES (6)..(6): Lys(Ac)
FGIAAKYQIDPDACFSAK

SEQ ID NO: 116 - protein, 13 aa, Homo sapiens
  MOD_RES (2)..(2): Lys(Ac)
YKWCEYGLTFTEK

SEQ ID NO: 117 - protein, 13 aa, Homo sapiens
  MOD_RES (2)..(2): Lys(Ac)
YKVCNYGLTFTQK

SEQ ID NO: 118 - protein, 9 aa, Homo sapiens
  MOD_RES (7)..(7): Lys(Ac)
FANYIDKVR

SEQ ID NO: 119 - protein, 14 aa, Homo sapiens
  MOD_RES (10)..(10): Lys(Ac)
ILLAELEQLKGQGK

SEQ ID NO: 120 - protein, 14 aa, Homo sapiens
  MOD_RES (9)..(9): Lys(Ac)
LQDEIQNMKEEMAR

SEQ ID NO: 121 - protein, 12 aa, Homo sapiens
  MOD_RES (2)..(2): Lys(Ac)
SKFADLSEAANR

SEQ ID NO: 122 - protein, 13 aa, Homo sapiens
  MOD_RES (4)..(4): Lys(Ac)
TNEKVELQELNDR

SEQ ID NO: 123 - protein, 9 aa, Homo sapiens
  MOD_RES (5)..(5): Lys(Ac)
ALQEKVEIK

SEQ ID NO: 124 - protein, 16 aa, Homo sapiens
  N-term Ac
  MOD_RES (14)..(14): Lys(Ac)
SIMSYNGGAIMAMKGK

SEQ ID NO: 125 - protein, 9 aa, Homo sapiens
  MOD_RES (4)..(4): Lys(Ac)
NLQKEVIHR

SEQ ID NO: 126 - protein, 18 aa, Homo sapiens
  MOD_RES (12)..(12): Lys(Ac)
LVDQSGPPHEPKFVYQAK

SEQ ID NO: 127 - protein, 17 aa, Homo sapiens
  MOD_RES (9)..(9): Lys(Ac)
HLSDSINQKHFEQAIER

SEQ ID NO: 128 - protein, 20 aa, Homo sapiens
  MOD_RES (11)..(11): Lys(Ac)
DAISGIGTDEKCLIEILASR

SEQ ID NO: 129 - protein, 16 aa, Homo sapiens
  MOD_RES (7)..(7): Lys(Ac)
DLMTDLKSEISGDLAR

SEQ ID NO: 130 - protein, 19 aa, Homo sapiens
  MOD_RES (16)..(16): Lys(Ac)
GTVRPANDFNPDADAKALR

SEQ ID NO: 131 - protein, 11 aa, Homo sapiens
  MOD_RES (4)..(4): Lys(Ac)
LENKMEGIGLK

SEQ ID NO: 132 - protein, 23 aa, Homo sapiens
  MOD_RES (11)..(11): Lys(Ac)
EQEHMINWVEKHVVQSISTQQEK

SEQ ID NO: 133 - protein, 13 aa, Homo sapiens
  MOD_RES (5)..(5): Lys(Ac)
LNEQKLAQLEEAK

SEQ ID NO: 134 - protein, 16 aa, Homo sapiens
  MOD_RES (11)..(11): Lys(Ac)
YGPFVADFADKLNEQK

SEQ ID NO: 135 - protein, 12 aa, Homo sapiens
  MOD_RES (10)..(10): Lys(Ac)
SCAEWVSLSKAR

SEQ ID NO: 136 - protein, 19 aa, Homo sapiens
  MOD_RES (16)..(16): Lys(Ac)
VNLQNNPGAMEHFHMKLFR

SEQ ID NO: 137 - protein, 21 aa, Homo sapiens
  MOD_RES (15)..(15): Lys(Ac)
LTALDYHNPAGFNCKDETEFR

SEQ ID NO: 138 - protein, 12 aa, Homo sapiens
  MOD_RES (9)..(9): Lys(Ac)
IYFTDSSSKWQR

SEQ ID NO: 139 - protein, 23 aa, Homo sapiens
  MOD_RES (12)..(12): Lys(Ac)
TPELNLDQFHDKTPYTIMFGPDK

SEQ ID NO: 140 - protein, 11 aa, Homo sapiens
  MOD_RES (4)..(4): Lys(Ac)
YIAKQESVEER

SEQ ID NO: 141 - protein, 11 aa, Homo sapiens
  MOD_RES (4)..(4): Lys(Ac)
EDQKPVMDDQR

SEQ ID NO: 142 - protein, 16 aa, Homo sapiens
  MOD_RES (6)..(6): Lys(Ac)
SHLIDKGMLTSTTEDE

SEQ ID NO: 143 - protein, 13 aa, Homo sapiens
  N-term Ac
  MOD_RES (5)..(5): Lys(Ac)
SVFGKLFGAGGGK

SEQ ID NO: 144 - protein, 18 aa, Homo sapiens
  MOD_RES (13)..(13): Lys(Ac)
STTELPLTVSYDKVSLGR

SEQ ID NO: 145 - protein, 21 aa, Homo sapiens
  MOD_RES (9)..(9): Lys(Ac)
DCDHADEQKCYSCGEFGHIQK

SEQ ID NO: 146 - protein, 18 aa, Homo sapiens
  MOD_RES (9)..(9): Lys(Ac)
GPIGSIGPKGIPGEDGYR

SEQ ID NO: 147 - protein, 11 aa, Homo sapiens
  MOD_RES (7)..(7): Lys(Ac)
YLLYGEKGTGK

SEQ ID NO: 148 - protein, 10 aa, Homo sapiens
  MOD_RES (5)..(5): Lys(Ac)
NIDPKPCTPR

SEQ ID NO: 149 - protein, 9 aa, Homo sapiens
  MOD_RES (4)..(4): Lys(Ac)
FNQKGEVYK

SEQ ID NO: 150 - protein, 10 aa, Homo sapiens
  MOD_RES (4)..(4): Lys(Ac)
WVFKEEGVLR

SEQ ID NO: 151 - protein, 7 aa, Homo sapiens
  MOD_RES (2)..(2): Lys(Ac)
SKEITVR

SEQ ID NO: 152 - protein, 18 aa, Homo sapiens
  MOD_RES (1)..(1): Lys(Ac)
KYEDICPSTHNMDVPNIK

SEQ ID NO: 153 - protein, 19 aa, Homo sapiens
  MOD_RES (18)..(18): Lys(Ac)
AHPVFYQGTYSQALNDAKR

SEQ ID NO: 154 - protein, 13 aa, Homo sapiens
  MOD_RES (7)..(7): Lys(Ac)
MPTPVIKAFGILK

SEQ ID NO: 155 - protein, 13 aa, Homo sapiens
  MOD_RES (4)..(4): Lys(Ac)
SNFKTCEESSFCK

SEQ ID NO: 156 - protein, 11 aa, Homo sapiens
  MOD_RES (9)..(9): Lys(Ac)
AVIWPQYVKDR

SEQ ID NO: 157 - protein, 13 aa, Homo sapiens
  MOD_RES (10)..(10): Lys(Ac)
EAALEPSMEKIFK

SEQ ID NO: 158 - protein, 12 aa, Homo sapiens
  MOD_RES (4)..(4): Lys(Ac)
TAMKYNLGLDLR

SEQ ID NO: 159 - protein, 17 aa, Homo sapiens
  MOD_RES (4)..(4): Lys(Ac)
NLDKEYLPIGGLAEFCK

SEQ ID NO: 160 - protein, 12 aa, Homo sapiens
  MOD_RES (5)..(5): Lys(Ac)
DSGNKPPGLLPR

SEQ ID NO: 161 - protein, 13 aa, Homo sapiens
  MOD_RES (5)..(5): Lys(Ac)
GDASKEDIDTAMK

SEQ ID NO: 162 - protein, 10 aa, Homo sapiens
  MOD_RES (5)..(5): Lys(Ac)
GFGGKYGVER

SEQ ID NO: 163 - protein, 11 aa, Homo sapiens
  MOD_RES (6)..(6): Lys(Ac)
YLENGKETLQR

SEQ ID NO: 164 - protein, 14 aa, Homo sapiens
  MOD_RES (1)..(1): Lys(Ac)
KHPDASVNFSEFSK

SEQ ID NO: 165 - protein, 20 aa, Homo sapiens
  MOD_RES (15)..(15): Lys(Ac)
GFAFVTFDDHDSVDKIVIQK

SEQ ID NO: 166 - protein, 16 aa, Homo sapiens
  MOD_RES (14)..(14): Lys(Ac)
IFVGGLSPDTPEEKIR

SEQ ID NO: 167 - protein, 9 aa, Homo sapiens
  MOD_RES (3)..(3): Lys(Ac)
ISKEVLAGR

SEQ ID NO: 168 - protein, 8 aa, Homo sapiens
  MOD_RES (4)..(4): Lys(Ac)
VTEKIPVR

SEQ ID NO: 169 - protein, 16 aa, Homo sapiens
  MOD_RES (6)..(6): Lys(Ac)
MKENQKHIYYITGETK

SEQ ID NO: 170 - protein, 8 aa, Homo sapiens
  MOD_RES (4)..(4): Lys(Ac)
AFYKSFSK

SEQ ID NO: 171 - protein, 8 aa, Homo sapiens
  MOD_RES (1)..(1): Lys(Ac)
KTFEINPR

SEQ ID NO: 172 - protein, 21 aa, Homo sapiens
  MOD_RES (5)..(5): Lys(Ac)
AVEEKIEWLESHQDADIEDFK

SEQ ID NO: 173 - protein, 9 aa, Homo sapiens
  MOD_RES (3)..(3): Lys(Ac)
DVKFGADAR

SEQ ID NO: 174 - protein, 8 aa, Homo sapiens
  MOD_RES (7)..(7): Lys(Ac)
IGIEIIKR

SEQ ID NO: 175 - protein, 16 aa, Homo sapiens
  MOD_RES (13)..(13): Lys(Ac)
TLNDELEIIEGMKFDR

SEQ ID NO: 176 - protein, 12 aa, Homo sapiens
  MOD_RES (8)..(8): Lys(Ac)
TPVIVTLKENER

SEQ ID NO: 177 - protein, 10 aa, Homo sapiens
  MOD_RES (5)..(5): Lys(Ac)
NTILKAYDGR

SEQ ID NO: 178 - protein, 10 aa, Homo sapiens
  MOD_RES (2)..(2): Lys(Ac)
HKDIDILIVR

SEQ ID NO: 179 - protein, 11 aa, Homo sapiens
  MOD_RES (3)..(3): Lys(Ac)
FEKEQQQLNWK

SEQ ID NO: 180 - protein, 21 aa, Homo sapiens
  MOD_RES (9)..(9): Lys(Ac)
IGFGSFVDKTVLPFVSTVPSK

SEQ ID NO: 181 - protein, 15 aa, Homo sapiens
  MOD_RES (4)..(4): Lys(Ac)
EVHKQVVESAYEVIK

SEQ ID NO: 182 - protein, 13 aa, Homo sapiens
  MOD_RES (2)..(2): Lys(Ac)
DKTQYIFNNMVLK

SEQ ID NO: 183 - protein, 12 aa, Homo sapiens
  MOD_RES (10)..(10): Lys(Ac)
VALEIFQHSKYK

SEQ ID NO: 184 - protein, 10 aa, Homo sapiens
  MOD_RES (8)..(8): Lys(Ac)
DELGDYLKPK

SEQ ID NO: 185 - protein, 15 aa, Homo sapiens
  MOD_RES (8)..(8): Lys(Ac)
DAAGSGDKPGADTGR

SEQ ID NO: 186 - protein, 17 aa, Homo sapiens
  MOD_RES (3)..(3): Lys(Ac)
VLKGNTAEGCVHETQEK

SEQ ID NO: 187 - protein, 9 aa, Homo sapiens
  MOD_RES (4)..(4): Lys(Ac)
FWNKFLENK

SEQ ID NO: 188 - protein, 13 aa, Homo sapiens
  MOD_RES (8)..(8): Lys(Ac)
TYGEIFEKFHPIR

SEQ ID NO: 189 - protein, 13 aa, Homo sapiens
  MOD_RES (12)..(12): Lys(Ac)
PGGPALWGDAFKR

SEQ ID NO: 190 - protein, 23 aa, Homo sapiens
  MOD_RES (16)..(16): Lys(Ac)
QGFNVVVESGAGEASKFSDDHYR

SEQ ID NO: 191 - protein, 8 aa, Homo sapiens
  MOD_RES (3)..(3): Lys(Ac)
ADKDYHFK

SEQ ID NO: 192 - protein, 11 aa, Homo sapiens
  MOD_RES (7)..(7): Lys(Ac)
NYEHLFKVNDK

SEQ ID NO: 193 - protein, 15 aa, Homo sapiens
  MOD_RES (5)..(5): Lys(Ac)
VVVGKTFDSIVMDPK

SEQ ID NO: 194 - protein, 14 aa, Homo sapiens
  MOD_RES (12)..(12): Lys(Ac)
NATVGQSVLNIKYK

SEQ ID NO: 195 - protein, 16 aa, Homo sapiens
  MOD_RES (11)..(11): Lys(Ac)
VLPSIVNEVLKSVVAK

SEQ ID NO: 196 - protein, 13 aa, Homo sapiens
  MOD_RES (7)..(7): Lys(Ac)
GDGTGGKSIYGER

SEQ ID NO: 197 - protein, 12 aa, Homo sapiens
  MOD_RES (8)..(8): Lys(Ac)
GLFIIDDKGILR

SEQ ID NO: 198 - protein, 16 aa, Homo sapiens
  MOD_RES (4)..(4): Lys(Ac)
KLPKNEPQNATGAPGR

SEQ ID NO: 199 - protein, 10 aa, Homo sapiens
  MOD_RES (6)..(6): Lys(Ac)
AGYNVKQLFR

SEQ ID NO: 200 - protein, 11 aa, Homo sapiens
  MOD_RES (9)..(9): Lys(Ac)
FLNAENAQKFK

SEQ ID NO: 201 - protein, 13 aa, Homo sapiens
  MOD_RES (9)..(9): Lys(Ac)
NCMTDLLAKLEAK

SEQ ID NO: 202 - protein, 11 aa, Homo sapiens
  MOD_RES (6)..(6): Lys(Ac)
ADINTKWAATR

SEQ ID NO: 203 - protein, 11 aa, Homo sapiens
  MOD_RES (5)..(5): Lys(Ac)
RPAVKQFHDSK

SEQ ID NO: 204 - protein, 12 aa, Homo sapiens
  MOD_RES (9)..(9): Lys(Ac)
AYGGSMCAKCVR

SEQ ID NO: 205 - protein, 25 aa, Homo sapiens
  MOD_RES (9)..(9): Lys(Ac)
NVTLPAVFKAPIRPDIVNFVHTNLR

SEQ ID NO: 206 - protein, 14 aa, Homo sapiens
  MOD_RES (13)..(13): Lys(Ac)
AGVNTVTTLVENKK

SEQ ID NO: 207 - protein, 12 aa, Homo sapiens
  MOD_RES (4)..(4): Lys(Ac)
GIVKDIIHDPGR

SEQ ID NO: 208 - protein, 17 aa, Homo sapiens
  MOD_RES (11)..(11): Lys(Ac)
GHLENNPALEKLLPHIR

SEQ ID NO: 209 - protein, 15 aa, Homo sapiens
  MOD_RES (5)..(5): Lys(Ac)
FFTVKLPVALDPGAK

SEQ ID NO: 210 - protein, 13 aa, Homo sapiens
  MOD_RES (7)..(7): Lys(Ac)
NVESYTKLGNPTR

SEQ ID NO: 211 - protein, 13 aa, Homo sapiens
  MOD_RES (4)..(4): Lys(Ac)
DLEKWQNNLLPSR

SEQ ID NO: 212 - protein, 13 aa, Homo sapiens
  MOD_RES (4)..(4): Lys(Ac)
IQDKEGIPPDQQR

SEQ ID NO: 213 - protein, 8 aa, Homo sapiens
  MOD_RES (6)..(6): Lys(Ac)
LIYDTKGR

SEQ ID NO: 214 - protein, 14 aa, Homo sapiens
  MOD_RES (10)..(10): Lys(Ac)
NKEEAAEYAKLLAK

SEQ ID NO: 215 - protein, 8 aa, Homo sapiens
  MOD_RES (3)..(3): Lys(Ac)
LIKVHLDK

SEQ ID NO: 216 - protein, 9 aa, Homo sapiens
  MOD_RES (5)..(5): Lys(Ac)
GYLTKEDLR

SEQ ID NO: 217 - protein, 9 aa, Homo sapiens
  MOD_RES (3)..(3): Lys(Ac)
IMKDLDQCR

SEQ ID NO: 218 - protein, 13 aa, Homo sapiens
  MOD_RES (4)..(4): Lys(Ac)
FLTKGDNNAVDDR

SEQ ID NO: 219 - protein, 20 aa, Homo sapiens
  MOD_RES (17)..(17): Lys(Ac)
FLEVIKPFCVILPEIQKPER

SEQ ID NO: 220 - protein, 16 aa, Homo sapiens
  MOD_RES (12)..(12): Lys(Ac)
GLSSLLYGSIPKAAVR

SEQ ID NO: 221 - protein, 11 aa, Homo sapiens
  MOD_RES (9)..(9): Lys(Ac)
LTEAKPVDKVK

SEQ ID NO: 222 - protein, 11 aa, Homo sapiens
  MOD_RES (4)..(4): Lys(Ac)
SLEKVCADLIR

SEQ ID NO: 223 - protein, 13 aa, Homo sapiens
  MOD_RES (8)..(8): Lys(Ac)
EVQTNDLKEVVNK

SEQ ID NO: 224 - protein, 28 aa, Homo sapiens
  N-term Ac
  MOD_RES (7)..(7): Lys(Ac)
SIGVPIKVLHEAEGHIVTCETNTGEVYR

SEQ ID NO: 225 - protein, 10 aa, Homo sapiens
  MOD_RES (3)..(3): Lys(Ac)
AVKHAEELER

SEQ ID NO: 226 - protein, 8 aa, Homo sapiens
  MOD_RES (5)..(5): Lys(Ac)
LSLDKVFR

SEQ ID NO: 227 - protein, 15 aa, Homo sapiens
  MOD_RES (3)..(3): Lys(Ac)
HIKENDYYTPTGEFR

SEQ ID NO: 228 - protein, 12 aa, Homo sapiens
  MOD_RES (9)..(9): Lys(Ac)
IGGSTDTGKHIK

SEQ ID NO: 229 - protein, 10 aa, Homo sapiens
  MOD_RES (8)..(8): Lys(Ac)
LFVGSIPKSK

SEQ ID NO: 230 - protein, 12 aa, Homo sapiens
  MOD_RES (10)..(10): Lys(Ac)
HYEVEILDAKTR

SEQ ID NO: 231 - protein, 12 aa, Homo sapiens
  MOD_RES (9)..(9): Lys(Ac)
NAVQALIDKHQR

SEQ ID NO: 232 - protein, 11 aa, Homo sapiens
  MOD_RES (9)..(9): Lys(Ac)
HVFTTFYAKTK

SEQ ID NO: 233 - protein, 10 aa, Homo sapiens
  MOD_RES (5)..(5): Lys(Ac)
SFEEKVENLK

SEQ ID NO: 234 - protein, 11 aa, Homo sapiens
  MOD_RES (4)..(4): Lys(Ac)
SDCKEFSSEAR

SEQ ID NO: 235 - protein, 18 aa, Homo sapiens
  MOD_RES (4)..(4): Lys(Ac)
SVQKLLDAVDTYIPVPAR

SEQ ID NO: 236 - protein, 19 aa, Homo sapiens
  MOD_RES (3)..(3): Lys(Ac)
IGKVDCTQHYELCSGNQVR

SEQ ID NO: 237 - protein, 14 aa, Homo sapiens
  MOD_RES (2)..(2): Lys(Ac)
NKTEDLEATSEHFK

SEQ ID NO: 238 - protein, 10 aa, Homo sapiens
  MOD_RES (3)..(3): Lys(Ac)
FLKFGMTPSK

SEQ ID NO: 239 - protein, 13 aa, Homo sapiens
  MOD_RES (5)..(5): Lys(Ac)
DIFNKGFGFGLVK

SEQ ID NO: 240 - protein, 12 aa, Homo sapiens
  MOD_RES (8)..(8): Lys(Ac)
GFGFGLVKLDVK

SEQ ID NO: 241 - protein, 17 aa, Homo sapiens
  MOD_RES (7)..(7): Lys(Ac)
FLEQQNKILLAELEQLK

SEQ ID NO: 242 - protein, 14 aa, Homo sapiens
  MOD_RES (13)..(13): Lys(Ac)
KVESLQEEIAFLKK

SEQ ID NO: 243 - protein, 12 aa, Homo sapiens
  MOD_RES (9)..(9): Lys(Ac)
FPTAIFESKGFR

SEQ ID NO: 244 - protein, 9 aa, Homo sapiens
  MOD_RES (6)..(6): Lys(Ac)
LHTGEKPYK

SEQ ID NO: 245 - protein, 13 aa, Homo sapiens
  MOD_RES (9)..(9): Lys(Ac)
KTPCGEGSKTWDR

SEQ ID NO: 246 - protein, 16 aa, Homo sapiens
  MOD_RES (1)..(1): Lys(Ac)
KYSQFINFPIYVWSSK

SEQ ID NO: 247 - protein, 15 aa, Homo sapiens
  MOD_RES (9)..(9): Lys(Ac)
PLISVYSEKGESSGK

SEQ ID NO: 248 - protein, 13 aa, Homo sapiens
  MOD_RES (7)..(7): Lys(Ac)
ALDLNLKHQILPK

SEQ ID NO: 249 - protein, 11 aa, Homo sapiens
  MOD_RES (8)..(8): Lys(Ac)
IGQGYLIKDGK

SEQ ID NO: 250 - protein, 10 aa, Homo sapiens
  MOD_RES (6)..(6): Lys(Ac)
VGIVGKYGTR

SEQ ID NO: 251 - protein, 9 aa, Homo sapiens
  MOD_RES (7)..(7): Lys(Ac)
LYATMEKHK

SEQ ID NO: 252 - protein, 15 aa, Homo sapiens
  MOD_RES (5)..(5): Lys(Ac)
TLQYKLLEPVLLLGK

SEQ ID NO: 253 - protein, 11 aa, Homo sapiens
  MOD_RES (8)..(8): Lys(Ac)
FPHSAHQKYVR

SEQ ID NO: 254 - protein, 9 aa, Homo sapiens
  MOD_RES (5)..(5): Lys(Ac)
YNCDKMICR

SEQ ID NO: 255 - protein, 10 aa, Homo sapiens
  MOD_RES (2)..(2): Lys(Ac)
SKSDPIMLLK

SEQ ID NO: 256 - protein, 9 aa, Homo sapiens
  MOD_RES (5)..(5): Lys(Ac)
NICSKYSVR

SEQ ID NO: 257 - protein, 9 aa, Homo sapiens
  MOD_RES (6)..(6): Lys(Ac)
NVLINKDIR

SEQ ID NO: 258 - protein, 9 aa, Homo sapiens
  MOD_RES (5)..(5): Lys(Ac)
YQQFKDFQR

SEQ ID NO: 259 - protein, 11 aa, Homo sapiens
  MOD_RES (3)..(3): Lys(Ac)
IPKHLTDAYFK

SEQ ID NO: 260 - protein, 11 aa, Homo sapiens
  MOD_RES (8)..(8): Lys(Ac)
AGLQVYNKCWK

SEQ ID NO: 261 - protein, 12 aa, Homo sapiens
  MOD_RES (8)..(8): Lys(Ac)
EVEEDEYKAFYK

SEQ ID NO: 262 - protein, 17 aa, Homo sapiens
  MOD_RES (4)..(4): Lys(Ac)
AVLKFAAATGATPIAGR

SEQ ID NO: 263 - protein, 10 aa, Homo sapiens
  MOD_RES (5)..(5): Lys(Ac)
FVVEKAEQQK

SEQ ID NO: 264 - protein, 9 aa, Homo sapiens
  MOD_RES (6)..(6): Lys(Ac)
IQEVLKHAR

SEQ ID NO: 265 - protein, 17 aa, Homo sapiens
  MOD_RES (3)..(3): Lys(Ac)
GSKFYGPAGPYGIFAGR

SEQ ID NO: 266 - protein, 12 aa, Homo sapiens
  MOD_RES (2)..(2): Lys(Ac)
AKFEELNMDLFR

SEQ ID NO: 267 - protein, 16 aa, Homo sapiens
  MOD_RES (15)..(15): Lys(Ac)
NQVALNPQNTVFDAKR

SEQ ID NO: 268 - protein, 15 aa, Homo sapiens
  MOD_RES (7)..(7): Lys(Ac)
DGLQNEKNIVSTPVK

SEQ ID NO: 269 - protein, 10 aa, Homo sapiens
  MOD_RES (5)..(5): Lys(Ac)
TLLIKTVETR

SEQ ID NO: 270 - protein, 12 aa, Homo sapiens
  MOD_RES (5)..(5): Lys(Ac)
TKYEKSLYSMIK

SEQ ID NO: 271 - protein, 9 aa, Homo sapiens
  MOD_RES (3)..(3): Lys(Ac)
QNKLEQVEK

SEQ ID NO: 272 - protein, 9 aa, Homo sapiens
  MOD_RES (5)..(5): Lys(Ac)
ATVPKTEIR

SEQ ID NO: 273 - protein, 10 aa, Homo sapiens
  MOD_RES (8)..(8): Lys(Ac)
VHVIFNYKGK

SEQ ID NO: 274 - protein, 11 aa, Homo sapiens
  MOD_RES (4)..(4): Lys(Ac)
YDGKWEVEEMK

SEQ ID NO: 275 - protein, 11 aa, Homo sapiens
  MOD_RES (5)..(5): Lys(Ac)
RMELKADQLYK

SEQ ID NO: 276 - protein, 10 aa, Homo sapiens
  MOD_RES (7)..(7): Lys(Ac)
VMEHFIKLYK

SEQ ID NO: 277 - protein, 10 aa, Homo sapiens
  N-term Ac
  MOD_RES (3)..(3): Lys(Ac)
AAKVFESIGK

SEQ ID NO: 278 - protein, 16 aa, Homo sapiens
  MOD_RES (4)..(4): Lys(Ac)
GWLKSNVSDAVAQSTR

SEQ ID NO: 279 - protein, 16 aa, Homo sapiens
  MOD_RES (11)..(11): Lys(Ac)
IVNSAQTGSFKQLTVK

SEQ ID NO: 280 - protein, 8 aa, Homo sapiens
  MOD_RES (3)..(3): Lys(Ac)
IFKSDGLR

SEQ ID NO: 281 - protein, 16 aa, Homo sapiens
  MOD_RES (7)..(7): Lys(Ac)
FVLSSGKFYGDEEKDK

SEQ ID NO: 282 - protein, 12 aa, Homo sapiens
  MOD_RES (7)..(7): Lys(Ac)
AINEAYKEDYHK

SEQ ID NO: 283 - protein, 14 aa, Homo sapiens
  N-term Ac
  MOD_RES (12)..(12): Lys(Ac)
AEYLASIFGTEKDK

SEQ ID NO: 284 - protein, 14 aa, Homo sapiens
  MOD_RES (6)..(6): Lys(Ac)
AISPDKDNFYFDVK

SEQ ID NO: 285 - protein, 9 aa, Homo sapiens
  MOD_RES (8)..(8): Lys(Ac)
NDTSGEYKK

SEQ ID NO: 286 - protein, 11 aa, Homo sapiens
  MOD_RES (10)..(10): Lys(Ac)
NFEDVAFDEKK

SEQ ID NO: 287 - protein, 11 aa, Homo sapiens
  MOD_RES (2)..(2): Lys(Ac)
FKLITEDVQGK

SEQ ID NO: 288 - protein, 8 aa, Homo sapiens
  MOD_RES (7)..(7): Lys(Ac)
EIFQNEKR

SEQ ID NO: 289 - protein, 10 aa, Homo sapiens
  MOD_RES (8)..(8): Lys(Ac)
TCDLVGEKGK

SEQ ID NO: 290 - protein, 21 aa, Homo sapiens
  MOD_RES (7)..(7): Lys(Ac)
VPVPEDKYTAQVDAEEKEDVK

SEQ ID NO: 291 - protein, 14 aa, Homo sapiens
  MOD_RES (5)..(5): Lys(Ac)
ILMSKPVLSGGTGR

SEQ ID NO: 292 - protein, 10 aa, Homo sapiens
  MOD_RES (7)..(7): Lys(Ac)
SAYFAEKLYK

SEQ ID NO: 293 - protein, 10 aa, Homo sapiens
  MOD_RES (5)..(5): Lys(Ac)
YFLDKTLTSR

SEQ ID NO: 294 - protein, 17 aa, Homo sapiens
  MOD_RES (4)..(4): Lys(Ac)
VLSKEFHLNESGDPSSK

SEQ ID NO: 295 - protein, 9 aa, Homo sapiens
  MOD_RES (7)..(7): Lys(Ac)
SEVDMLKIR

SEQ ID NO: 296 - protein, 9 aa, Homo sapiens
  MOD_RES (6)..(6): Lys(Ac)
LVAENKFGK

SEQ ID NO: 297 - protein, 17 aa, Homo sapiens
  MOD_RES (9)..(9): Lys(Ac)
THILLFLPKSVSDYDGK

SEQ ID NO: 298 - protein, 12 aa, Homo sapiens
  MOD_RES (9)..(9): Lys(Ac)
NKPLFFADKLYK

SEQ ID NO: 299 - protein, 8 aa, Homo sapiens
  MOD_RES (3)..(3): Lys(Ac)
ISKEEAMR

SEQ ID NO: 300 - protein, 8 aa, Homo sapiens
  MOD_RES (7)..(7): Lys(Ac)
AIFAGYKR

SEQ ID NO: 301 - protein, 10 aa, Homo sapiens
  MOD_RES (9)..(9): Lys(Ac)
AGLVDDFEKK

SEQ ID NO: 302 - protein, 10 aa, Homo sapiens
  MOD_RES (6)..(6): Lys(Ac)
LLEQYKEESK

SEQ ID NO: 303 - protein, 15 aa, Homo sapiens
  MOD_RES (5)..(5): Lys(Ac)
VLVGKNFEDVAFDEK

SEQ ID NO: 304 - protein, 9 aa, Homo sapiens
  MOD_RES (7)..(7): Lys(Ac)
LEMSYSKFK

SEQ ID NO: 305 - protein, 8 aa, Homo sapiens
  MOD_RES (6)..(6): Lys(Ac)
PAQGAKYR

SEQ ID NO: 306 - protein, 14 aa, Homo sapiens
  MOD_RES (6)..(6): Lys(Ac)
IFGSNKWTTEQQQR

SEQ ID NO: 307 - protein, 17 aa, Homo sapiens
  MOD_RES (12)..(12): Lys(Ac)
HVVQSISTQQEKETIAK

SEQ ID NO: 308 - protein, 9 aa, Homo sapiens
  MOD_RES (4)..(4): Lys(Ac)
VPGKDTVTK

SEQ ID NO: 309 - protein, 12 aa, Homo sapiens
  MOD_RES (5)..(5): Lys(Ac)
  MOD_RES (11)..(11): Lys(Ac)
PEPAKSAPAPKK

SEQ ID NO: 310 - protein, 9 aa, Homo sapiens
  MOD_RES (1)..(1): Lys(Ac)
  MOD_RES (6)..(6): Lys(Ac)
KSTGGKAPR

SEQ ID NO: 311 - protein, 9 aa, Homo sapiens
  MOD_RES (2)..(2): Lys(Ac)
  MOD_RES (5)..(5): Lys(Ac)
GKGGKGLGK

SEQ ID NO: 312 - protein, 9 aa, Homo sapiens
  MOD_RES (4)..(4): Lys(Ac)
  MOD_RES (8)..(8): Lys(Ac)
GLGKGGAKR

SEQ ID NO: 313 - protein, 9 aa, Homo sapiens
  MOD_RES (4)..(4): Lys(Ac)
GLGKGGAKR

SEQ ID NO: 314 - protein, 16 aa, Homo sapiens
  MOD_RES (2)..(2): Lys(Ac)
EKNLLHVTDTGVGMTR

SEQ ID NO: 315 - protein, 10 aa, Homo sapiens
  MOD_RES (6)..(6): Lys(Ac)
KSDYIKLYVR

SEQ ID NO: 316 - protein, 11 aa, Homo sapiens
  MOD_RES (1)..(1): Lys(Ac)
KSADTLWGIQK

SEQ ID NO: 317 - protein, 14 aa, Homo sapiens
  MOD_RES (5)..(5): Lys(Ac)
IVADKDYSVTANSK

SEQ ID NO: 318 - protein, 15 aa, Homo sapiens
  MOD_RES (10)..(10): Lys(Ac)
VVDSMDALDKVVQER

SEQ ID NO: 319 - protein, 9 aa, Homo sapiens
  MOD_RES (4)..(4): Lys(Ac)
YSAKDYFFK

SEQ ID NO: 320 - protein, 12 aa, Homo sapiens
  MOD_RES (6)..(6): Lys(Ac)
GIVLEKVGVEAK

SEQ ID NO: 321 - protein, 14 aa, Homo sapiens
  MOD_RES (10)..(10): Lys(Ac)
DLQQYQSQAKQLFR

SEQ ID NO: 322 - protein, 10 aa, Homo sapiens
  MOD_RES (5)..(5): Lys(Ac)
LLASKSLLNR

SEQ ID NO: 323 - protein, 10 aa, Homo sapiens
  MOD_RES (7)..(7): Lys(Ac)
TMSCSDKILR

SEQ ID NO: 324 - protein, 9 aa, Homo sapiens
  MOD_RES (6)..(6): Lys(Ac)
MVAAAKYAR

SEQ ID NO: 325 - protein, 14 aa, Homo sapiens
  MOD_RES (5)..(5): Lys(Ac)
FEDPKFEVIEKPQA

SEQ ID NO: 326 - protein, 14 aa, Homo sapiens
  MOD_RES (11)..(11): Lys(Ac)
VQDGLSDIAEKFLK

SEQ ID NO: 327 - protein, 10 aa, Homo sapiens
  MOD_RES (3)..(3): Lys(Ac)
LNKPFLFDTK

SEQ ID NO: 328 - protein, 10 aa, Homo sapiens
  MOD_RES (8)..(8): Lys(Ac)
AAEEVEAKFK

SEQ ID NO: 329 - protein, 12 aa, Homo sapiens
  MOD_RES (4)..(4): Lys(Ac)
SLLKPFCAALLK

SEQ ID NO: 330 - protein, 14 aa, Homo sapiens
  MOD_RES (9)..(9): Lys(Ac)
SMSTEGLMKFVDSK

SEQ ID NO: 331 - protein, 12 aa, Homo sapiens
  MOD_RES (5)..(5): Lys(Ac)
YNIEKDIAAYIK

SEQ ID NO: 332 - protein, 14 aa, Homo sapiens
  MOD_RES (5)..(5): Lys(Ac)
YLAEKYEWDVAEAR

SEQ ID NO: 333 - protein, 15 aa, Homo sapiens
  MOD_RES (2)..(2): Lys(Ac)
FKILDAVVAQEPLHR

SEQ ID NO: 334 - protein, 11 aa, Homo sapiens
  MOD_RES (10)..(10): Lys(Ac)
LEAMCFDGVKR

SEQ ID NO: 335 - protein, 9 aa, Homo sapiens
  MOD_RES (4)..(4): Lys(Ac)
LMCKPIFSK

SEQ ID NO: 336 - protein, 25 aa, Homo sapiens
  MOD_RES (15)..(15): Lys(Ac)
SNPSEVVEFTTCPDKPGIPVKPSVK

SEQ ID NO: 337 - protein, 11 aa, Homo sapiens
  MOD_RES (7)..(7): Lys(Ac)
EIAQEFKTDLR

SEQ ID NO: 338 - protein, 14 aa, Homo sapiens
  MOD_RES (7)..(7): Lys(Ac)
APQCLGKFIEIAAR

SEQ ID NO: 339 - protein, 8 aa, Homo sapiens
  MOD_RES (7)..(7): Lys(Ac)
MMVAGFKK

SEQ ID NO: 340 - protein, 8 aa, Homo sapiens
  MOD_RES (4)..(4): Lys(Ac)
FEYKYSFK

SEQ ID NO: 341 - protein, 17 aa, Homo sapiens
  MOD_RES (7)..(7): Lys(Ac)
IINEVSKPLAHHIPVEK

SEQ ID NO: 342 - protein, 9 aa, Homo sapiens
  MOD_RES (4)..(4): Lys(Ac)
FLNKLAEER

SEQ ID NO: 343 - protein, 8 aa, Homo sapiens
  MOD_RES (6)..(6): Lys(Ac)
VHLSQKYK

SEQ ID NO: 344 - protein, 7 aa, Homo sapiens
  MOD_RES (3)..(3): Lys(Ac)
INKALDK

SEQ ID NO: 345 - protein, 10 aa, Homo sapiens
  MOD_RES (5)..(5): Lys(Ac)
FCLSKPGVYK

SEQ ID NO: 346 - protein, 15 aa, Homo sapiens
  MOD_RES (10)..(10): Lys(Ac)
AQNDLIWNIKDELKK

SEQ ID NO: 347 - protein, 9 aa, Homo sapiens
  MOD_RES (7)..(7): Lys(Ac)
FPDENFKLK

SEQ ID NO: 348 - protein, 10 aa, Homo sapiens
  MOD_RES (6)..(6): Lys(Ac)
TNVPVKLFAR

SEQ ID NO: 349 - protein, 18 aa, Homo sapiens
  MOD_RES (15)..(15): Lys(Ac)
GYAYVEFENPDEAEKALK

SEQ ID NO: 350 - protein, 10 aa, Homo sapiens
  MOD_RES (8)..(8): Lys(Ac)
VTNLLMLKGK

SEQ ID NO: 351 - protein, 17 aa, Homo sapiens
  MOD_RES (9)..(9): Lys(Ac)
KIEISQHAKYTCSFCGK

SEQ ID NO: 352 - protein, 13 aa, Homo sapiens
  MOD_RES (8)..(8): Lys(Ac)
DTYIENEKLISGK

SEQ ID NO: 353 - protein, 14 aa, Homo sapiens
  MOD_RES (7)..(7): Lys(Ac)
KDVHMPKHPELADK

SEQ ID NO: 354 - protein, 12 aa, Homo sapiens
  MOD_RES (4)..(4): Lys(Ac)
TFEKSMMNLQTK

SEQ ID NO: 355 - protein, 14 aa, Homo sapiens
  MOD_RES (10)..(10): Lys(Ac)
KQELLEALTKHFQD

SEQ ID NO: 356 - protein, 7 aa, Homo sapiens
  MOD_RES (3)..(3): Lys(Ac)
NFKSISK

SEQ ID NO: 357 - protein, 11 aa, Homo sapiens
  MOD_RES (7)..(7): Lys(Ac)
TNFSNEKTISK

SEQ ID NO: 358 - protein, 15 aa, Homo sapiens
  MOD_RES (1)..(1): Lys(Ac)
KYGKSLYYYIQQDTK

SEQ ID NO: 359 - protein, 10 aa, Homo sapiens
  MOD_RES (6)..(6): Lys(Ac)
RPEILKQEIK

SEQ ID NO: 360 - protein, 16 aa, Homo sapiens
  MOD_RES (14)..(14): Lys(Ac)
ELQEMDKDDESLIKYK

SEQ ID NO: 361 - protein, 10 aa, Homo sapiens
  MOD_RES (8)..(8): Lys(Ac)
NAYVWTLKGR

SEQ ID NO: 362 - protein, 18 aa, Homo sapiens
  MOD_RES (8)..(8): Lys(Ac)
VFDPQNDKPSKWWTCFVK

SEQ ID NO: 363 - protein, 12 aa, Homo sapiens
  MOD_RES (6)..(6): Lys(Ac)
VLISFKANDIEK

SEQ ID NO: 364 - protein, 22 aa, Homo sapiens
  MOD_RES (17)..(17): Lys(Ac)
LAALPENPPAIDWAYYKANVAK

SEQ ID NO: 365 - protein, 12 aa, Homo sapiens
  MOD_RES (7)..(7): Lys(Ac)
ELDPIQKLFVDK

SEQ ID NO: 366 - protein, 22 aa, Homo sapiens
  MOD_RES (9)..(9): Lys(Ac)
  MOD_RES (16)..(16): Lys(Ac)
GHCPPAPAKPMHPENKLTNHGK

SEQ ID NO: 367 - protein, 9 aa, Homo sapiens
  MOD_RES (6)..(6): Lys(Ac)
LVGELKLDR

SEQ ID NO: 368 - protein, 9 aa, Homo sapiens
  MOD_RES (4)..(4): Lys(Ac)
SNYKMMFVK

SEQ ID NO: 369 - protein, 11 aa, Homo sapiens
  MOD_RES (1)..(1): Lys(Ac)
KHDSGAADLER

SEQ ID NO: 370 - protein, 11 aa, Homo sapiens
  MOD_RES (5)..(5): Lys(Ac)
AELSKLVIVAK

SEQ ID NO: 371 - protein, 9 aa, Homo sapiens
  MOD_RES (7)..(7): Lys(Ac)
LHSNYYKHK

SEQ ID NO: 372 - protein, 24 aa, Homo sapiens
  MOD_RES (11)..(11): Lys(Ac)
GQTLVVQFTVKHEQNIDCGGGYVK

SEQ ID NO: 373 - protein, 16 aa, Homo sapiens
  MOD_RES (1)..(1): Lys(Ac)
KVCGDSDKGFVVINQK

SEQ ID NO: 374 - protein, 9 aa, Homo sapiens
  N-term Ac
  MOD_RES (6)..(6): Lys(Ac)
MEDYTKIEK

SEQ ID NO: 375 - protein, 7 aa, Homo sapiens
  MOD_RES (2)..(2): Lys(Ac)
LKADVFK

SEQ ID NO: 376 - protein, 11 aa, Homo sapiens
  N-term Ac
  MOD_RES (5)..(5): Lys(Ac)
SNMEKHLFNLK

SEQ ID NO: 377 - protein, 7 aa, Homo sapiens
  MOD_RES (2)..(2): Lys(Ac)
GKYMLVR

SEQ ID NO: 378 - protein, 22 aa, Homo sapiens
  MOD_RES (17)..(17): Lys(Ac)
FLDGNEMTLADCNLLPKLHIVK

SEQ ID NO: 379 - protein, 10 aa, Homo sapiens
  N-term Ac
  MOD_RES (7)..(7): Lys(Ac)
SSNECFKCGR

SEQ ID NO: 380 - protein, 8 aa, Homo sapiens
  MOD_RES (3)..(3): Lys(Ac)
NLKNEITK

SEQ ID NO: 381 - protein, 18 aa, Homo sapiens
  MOD_RES (11)..(11): Lys(Ac)
DHPLPEVAHVKHLSASQK

SEQ ID NO: 382 - protein, 15 aa, Homo sapiens
  MOD_RES (9)..(9): Lys(Ac)
NLPFSVENKWSLLAK

SEQ ID NO: 383 - protein, 17 aa, Homo sapiens
  MOD_RES (10)..(10): Lys(Ac)
GLESTTLADKDGEIYCK

SEQ ID NO: 384 - protein, 19 aa, Homo sapiens
  MOD_RES (7)..(7): Lys(Ac)
HTENVAKFHCPHCDTVIAR

SEQ ID NO: 385 - protein, 12 aa, Homo sapiens
  MOD_RES (4)..(4): Lys(Ac)
LHYKHESWLLHR

SEQ ID NO: 386 - protein, 16 aa, Homo sapiens
  MOD_RES (6)..(6): Lys(Ac)
QLNDVKTTVVYPATEK

SEQ ID NO: 387 - protein, 20 aa, Homo sapiens
  MOD_RES (12)..(12): Lys(Ac)
SHSAHFFEFLTKELALGQDR

SEQ ID NO: 388 - protein, 9 aa, Homo sapiens
  MOD_RES (5)..(5): Lys(Ac)
KDFIKTTVK

SEQ ID NO: 389 - protein, 16 aa, Homo sapiens
  MOD_RES (9)..(9): Lys(Ac)
LCMLYHPDKHRDPELK

SEQ ID NO: 390 - protein, 8 aa, Homo sapiens
  MOD_RES (3)..(3): Lys(Ac)
LCKYIYAK

SEQ ID NO: 391 - protein, 15 aa, Homo sapiens
  MOD_RES (9)..(9): Lys(Ac)
KPEENPASKFSSASK

SEQ ID NO: 392 - protein, 20 aa, Homo sapiens
  MOD_RES (13)..(13): Lys(Ac)
  MOD_RES (17)..(17): Lys(Ac)
EENTSNESTDVTKGDSKNAK

SEQ ID NO: 393 - protein, 12 aa, Homo sapiens
  MOD_RES (7)..(7): Lys(Ac)
GLAPQNKPELQK

SEQ ID NO: 394 - protein, 8 aa, Homo sapiens
  MOD_RES (5)..(5): Lys(Ac)
VYISKCYR

SEQ ID NO: 395 - protein, 7 aa, Homo sapiens
  MOD_RES (5)..(5): Lys(Ac)
SFYYKLR

SEQ ID NO: 396 - protein, 12 aa, Homo sapiens
  MOD_RES (9)..(9): Lys(Ac)
AVSMDNSNKYTK

SEQ ID NO: 397 - protein, 11 aa, Homo sapiens
  MOD_RES (4)..(4): Lys(Ac)
FAFKEVEVQAK

SEQ ID NO: 398 - protein, 14 aa, Homo sapiens
  MOD_RES (9)..(9): Lys(Ac)
LVQTAELTKVFEIR

SEQ ID NO: 399 - protein, 25 aa, Homo sapiens
  MOD_RES (9)..(9): Lys(Ac)
LWNTLGVCKYTVQDESHSEWVSCVR

SEQ ID NO: 400 - protein, 12 aa, Homo sapiens
  MOD_RES (4)..(4): Lys(Ac)
EFTKLEEVLTNK

SEQ ID NO: 401 - protein, 15 aa, Homo sapiens
  MOD_RES (6)..(6): Lys(Ac)
VIIVVKDGPGFYTTR

SEQ ID NO: 402 - protein, 10 aa, Homo sapiens
  MOD_RES (2)..(2): Lys(Ac)
AKFESMAEEK

SEQ ID NO: 403 - protein, 16 aa, Homo sapiens
  MOD_RES (8)..(8): Lys(Ac)
ATAEEMTKYHSDEYIK

SEQ ID NO: 404 - protein, 12 aa, Homo sapiens
  MOD_RES (7)..(7): Lys(Ac)
ESESVDKVMDQK

SEQ ID NO: 405 - protein, 19 aa, Homo sapiens
  MOD_RES (13)..(13): Lys(Ac)
VFITDDFHDMMPKYLNFVK

SEQ ID NO: 406 - protein, 23 aa, Homo sapiens
  MOD_RES (17)..(17): Lys(Ac)
IQEIIEQLDVTTSEYEKEKLNER

SEQ ID NO: 407 - protein, 13 aa, Homo sapiens
  MOD_RES (8)..(8): Lys(Ac)
TFYQMYDKGLVYR

SEQ ID NO: 408 - protein, 19 aa, Homo sapiens
  MOD_RES (11)..(11): Lys(Ac)
NVTAIQGPGGKWMIPSEAK

SEQ ID NO: 409 - protein, 14 aa, Homo sapiens
  MOD_RES (8)..(8): Lys(Ac)
KSEDTISKMNDFMR

SEQ ID NO: 410 - protein, 12 aa, Homo sapiens
  MOD_RES (7)..(7): Lys(Ac)
SQSCETKLLDEK

SEQ ID NO: 411 - protein, 8 aa, Homo sapiens
  MOD_RES (2)..(2): Lys(Ac)
KKFLCVTK

SEQ ID NO: 412 - protein, 13 aa, Homo sapiens
  MOD_RES (4)..(4): Lys(Ac)
IQFKQDDGTGPEK

SEQ ID NO: 413 - protein, 8 aa, Homo sapiens
  MOD_RES (1)..(1): Lys(Ac)
KGPSVQKR

SEQ ID NO: 414 - protein, 7 aa, Homo sapiens
  MOD_RES (2)..(2): Lys(Ac)
LKAEKYR

SEQ ID NO: 415 - protein, 14 aa, Homo sapiens
  MOD_RES (4)..(4): Lys(Ac)
FQAKLEHEYIQNFK

SEQ ID NO: 416 - protein, 15 aa, Homo sapiens
  MOD_RES (9)..(9): Lys(Ac)
  MOD_RES (14)..(14): Lys(Ac)
NVQQTVSAKGPPEKR

SEQ ID NO: 417 - protein, 24 aa, Homo sapiens
  MOD_RES (2)..(2): Lys(Ac)
YKVEYPIMYSTDPENGHIFNCIQR

SEQ ID NO: 418 - protein, 19 aa, Homo sapiens
  MOD_RES (6)..(6): Lys(Ac)
TPSVGKAMDTPKPAGGDEK

SEQ ID NO: 419 - protein, 7 aa, Homo sapiens
  MOD_RES (5)..(5): Lys(Ac)
IIWHKFK

SEQ ID NO: 420 - protein, 7 aa, Homo sapiens
  MOD_RES (2)..(2): Lys(Ac)
FKECLDK

SEQ ID NO: 421 - protein, 8 aa, Homo sapiens
  N-term Ac
  MOD_RES (5)..(5): Lys(Ac)
AQLGKLLK

SEQ ID NO: 422 - protein, 9 aa, Homo sapiens
  MOD_RES (6)..(6): Lys(Ac)
SELEFKFNR

SEQ ID NO: 423 - protein, 14 aa, Homo sapiens
  MOD_RES (9)..(9): Lys(Ac)
YTEQITNEKLAMVK

SEQ ID NO: 424 - protein, 13 aa, Homo sapiens
  MOD_RES (6)..(6): Lys(Ac)
YHVSEKPYGIVEK

SEQ ID NO: 425 - protein, 19 aa, Homo sapiens
  MOD_RES (6)..(6): Lys(Ac)
CHAFEKEWIECAHGIGYTR

SEQ ID NO: 426 - protein, 9 aa, Homo sapiens
  MOD_RES (4)..(4): Lys(Ac)
DVTKAMDEK

SEQ ID NO: 427 - protein, 11 aa, Homo sapiens
  MOD_RES (10)..(10): Lys(Ac)
EGVHGGLINKK

SEQ ID NO: 428 - protein, 14 aa, Homo sapiens
  MOD_RES (4)..(4): Lys(Ac)
TVSKVDDFLANEAK

SEQ ID NO: 429 - protein, 18 aa, Homo sapiens
  MOD_RES (12)..(12): Lys(Ac)
ITLPVDFVTADKFDENAK

SEQ ID NO: 430 - protein, 20 aa, Homo sapiens
  MOD_RES (16)..(16): Lys(Ac)
NVTGHYISPFHDIPLKVNSK

SEQ ID NO: 431 - protein, 12 aa, Homo sapiens
  MOD_RES (9)..(9): Lys(Ac)
FEDENFHYKHDR

SEQ ID NO: 432 - protein, 17 aa, Homo sapiens
  MOD_RES (8)..(8): Lys(Ac)
HSPEDPEKYSCFALFVK

SEQ ID NO: 433 - protein, 8 aa, Homo sapiens
  MOD_RES (3)..(3): Lys(Ac)
MLKQMLFR

SEQ ID NO: 434 - protein, 8 aa, Homo sapiens
  MOD_RES (3)..(3): Lys(Ac)
IMKSEVLR

SEQ ID NO: 435 - protein, 15 aa, Homo sapiens
  MOD_RES (7)..(7): Lys(Ac)
TTHLIAKEEMIHNLQ

SEQ ID NO: 436 - protein, 9 aa, Homo sapiens
  MOD_RES (7)..(7): Lys(Ac)
VAHLALKHR

SEQ ID NO: 437 - protein, 17 aa, Homo sapiens
  N-term Ac
  MOD_RES (14)..(14): Lys(Ac)
SDAAVDTSSEITTKDLK

SEQ ID NO: 438 - protein, 9 aa, Homo sapiens
  MOD_RES (6)..(6): Lys(Ac)
HMVMQKLLR

SEQ ID NO: 439 - protein, 7 aa, Homo sapiens
  MOD_RES (5)..(5): Lys(Ac)
AFQLKSR

SEQ ID NO: 440 - protein, 8 aa, Homo sapiens
  MOD_RES (4)..(4): Lys(Ac)
IMQKYGFR

SEQ ID NO: 441 - protein, 25 aa, Homo sapiens
  MOD_RES (21)..(21): Lys(Ac)
GNLYSFGCPEYGQLGHNSDGKFIAR

SEQ ID NO: 442 - protein, 20 aa, Homo sapiens
  MOD_RES (6)..(6): Lys(Ac)
WTPEVKHFCPNVPIILVGNK

SEQ ID NO: 443 - protein, 11 aa, Homo sapiens
  MOD_RES (6)..(6): Lys(Ac)
AYHLQKSTCGK

SEQ ID NO: 444 - protein, 12 aa, Homo sapiens
  MOD_RES (4)..(4): Lys(Ac)
NVYKFELDTSER

SEQ ID NO: 445 - protein, 10 aa, Homo sapiens
  MOD_RES (9)..(9): Lys(Ac)
VETFSGVYKK

SEQ ID NO: 446 - protein, 9 aa, Homo sapiens
  MOD_RES (4)..(4): Lys(Ac)
MLEKDVCEK

SEQ ID NO: 447 - protein, 9 aa, Homo sapiens
  MOD_RES (5)..(5): Lys(Ac)
VEWAKFQER

SEQ ID NO: 448 - protein, 18 aa, Homo sapiens
  MOD_RES (4)..(4): Lys(Ac)
LNPKTGLIDYNQLALTAR

SEQ ID NO: 449 - protein, 17 aa, Homo sapiens
  MOD_RES (5)..(5): Lys(Ac)
GNTPKYGLIFHSTFIGR

SEQ ID NO: 450 - protein, 22 aa, Homo sapiens
  MOD_RES (15)..(15): Lys(Ac)
HHAAYVNNLNVTEEKYQEALAK

SEQ ID NO: 451 - protein, 13 aa, Homo sapiens
  MOD_RES (6)..(6): Lys(Ac)
TTTCSKLAYYYQR

SEQ ID NO: 452 - protein, 10 aa, Homo sapiens
  MOD_RES (2)..(2): Lys(Ac)
DKWLCPLSGK

SEQ ID NO: 453 - protein, 13 aa, Homo sapiens
  MOD_RES (11)..(11): Lys(Ac)
IIEDQQESLNKWK

SEQ ID NO: 454 - protein, 13 aa, Homo sapiens
  MOD_RES (9)..(9): Lys(Ac)
IDYGEYMDKNNVR

SEQ ID NO: 455 - protein, 19 aa, Homo sapiens
  MOD_RES (11)..(11): Lys(Ac)
GEDFPANNIVKFLVGFTNK

SEQ ID NO: 456 - protein, 25 aa, Homo sapiens
  MOD_RES (2)..(2): Lys(Ac)
DKLAQQQAAAAAAAAAAASQQGSAK

SEQ ID NO: 457 - protein, 11 aa, Homo sapiens
  MOD_RES (8)..(8): Lys(Ac)
IAVEAQNKYER

SEQ ID NO: 458 - protein, 15 aa, Homo sapiens
  MOD_RES (5)..(5): Lys(Ac)
SQNTKISTQLDFASK

SEQ ID NO: 459 - protein, 10 aa, Homo sapiens
  MOD_RES (2)..(2): Lys(Ac)
GKLEEQRPER

SEQ ID NO: 460 - protein, 18 aa, Homo sapiens
  MOD_RES (14)..(14): Lys(Ac)
QPAENVNQYLTDPKFVER

SEQ ID NO: 461 - protein, 13 aa, Homo sapiens
  MOD_RES (6)..(6): Lys(Ac)
YPPPYKHFWTAES

SEQ ID NO: 462 - protein, 11 aa, Homo sapiens
  MOD_RES (8)..(8): Lys(Ac)
IYHPNVDKLGR

SEQ ID NO: 463 - protein, 7 aa, Homo sapiens
  MOD_RES (3)..(3): Lys(Ac)
ACKLAIR

SEQ ID NO: 464 - protein, 14 aa, Homo sapiens
  N-term Ac
  MOD_RES (11)..(11): Lys(Ac)
AVPPTYADLGKSAR

SEQ ID NO: 465 - protein, 12 aa, Homo sapiens
  MOD_RES (8)..(8): Lys(Ac)
GYGFGLIKLDLK

SEQ ID NO: 466 - protein, 18 aa, Homo sapiens
  MOD_RES (10)..(10): Lys(Ac)
LTLSALLDGKNVNAGGHK

SEQ ID NO: 467 - protein, 13 aa, Homo sapiens
  MOD_RES (5)..(5): Lys(Ac)
DVFNKGYGFGMVK

SEQ ID NO: 468 - protein, 12 aa, Homo sapiens
  MOD_RES (6)..(6): Lys(Ac)
FGIAAKYMLDCR

SEQ ID NO: 469 - protein, 18 aa, Homo sapiens
  MOD_RES (10)..(10): Lys(Ac)
LTLSALIDGKNFSAGGHK

SEQ ID NO: 470 - protein, 12 aa, Homo sapiens
  MOD_RES (3)..(3): Lys(Ac)
SGKFMNPTDQAR

SEQ ID NO: 471 - protein, 11 aa, Homo sapiens
  MOD_RES (7)..(7): Lys(Ac)
QLGSILKTNVR

SEQ ID NO: 472 - protein, 7 aa, Homo sapiens
  MOD_RES (5)..(5): Lys(Ac)
AIVEKLR

SEQ ID NO: 473 - protein, 13 aa, Homo sapiens
  MOD_RES (6)..(6): Lys(Ac)
CPICEKVIQGAGK

SEQ ID NO: 474 - protein, 16 aa, Homo sapiens
  MOD_RES (8)..(8): Lys(Ac)
SIDFPLTKVYVVEGSK

SEQ ID NO: 475 - protein, 18 aa, Homo sapiens
  MOD_RES (4)..(4): Lys(Ac)
IIEKDVMEGVTVDDHMMK

SEQ ID NO: 476 - protein, 13 aa, Homo sapiens
  MOD_RES (5)..(5): Lys(Ac)
LVSEKLASYQAAR

SEQ ID NO: 477 - protein, 8 aa, Homo sapiens
  MOD_RES (4)..(4): Lys(Ac)
SFDKNLYR

SEQ ID NO: 478 - protein, 9 aa, Homo sapiens
  MOD_RES (7)..(7): Lys(Ac)
LVDTGDKFR

SEQ ID NO: 479 - protein, 18 aa, Homo sapiens
  MOD_RES (6)..(6): Lys(Ac)
FGIAAKYQLDPTASISAK

SEQ ID NO: 480 - protein, 13 aa, Homo sapiens
  MOD_RES (2)..(2): Lys(Ac)
IKEKYIDQEELNK

SEQ ID NO: 481 - protein, 12 aa, Homo sapiens
  MOD_RES (8)..(8): Lys(Ac)
SYAEELAKHGMK

SEQ ID NO: 482 - protein, 14 aa, Homo sapiens
  MOD_RES (5)..(5): Lys(Ac)
EHLLKYEYQPFAGK

SEQ ID NO: 483 - protein, 11 aa, Homo sapiens
  MOD_RES (5)..(5): Lys(Ac)
GVHPKFPEGGK

SEQ ID NO: 484 - protein, 12 aa, Homo sapiens
  MOD_RES (3)..(3): Lys(Ac)
LAKLSDGVAVLK

SEQ ID NO: 485 - protein, 9 aa, Homo sapiens
  MOD_RES (5)..(5): Lys(Ac)
LTLDKLDVK

SEQ ID NO: 486 - protein, 12 aa, Homo sapiens
  MOD_RES (6)..(6): Lys(Ac)
DVTLQKQCVPFR

SEQ ID NO: 487 - protein, 11 aa, Homo sapiens
  MOD_RES (8)..(8): Lys(Ac)
FVATGHGKYEK

SEQ ID NO: 488 - protein, 9 aa, Homo sapiens
  MOD_RES (5)..(5): Lys(Ac)
VAILKANLR

SEQ ID NO: 489 - protein, 15 aa, Homo sapiens
  MOD_RES (4)..(4): Lys(Ac)
IVQKHPHTGDTKEEK

SEQ ID NO: 490 - protein, 8 aa, Homo sapiens
  MOD_RES (3)..(4): Lys(Ac)
GSKKAVTK

SEQ ID NO: 491 - protein, 15 aa, Homo sapiens
  MOD_RES (10)..(10): Lys(Ac)
PKPYDPPGEKMVAAK

SEQ ID NO: 492 - protein, 10 aa, Homo sapiens
  MOD_RES (7)..(7): Lys(Ac)
RPPQTIKSVR

SEQ ID NO: 493 - protein, 17 aa, Homo sapiens
  MOD_RES (13)..(13): Lys(Ac)
STPAITLESPDIKYPLR

SEQ ID NO: 494 - protein, 10 aa, Homo sapiens
  MOD_RES (4)..(4): Lys(Ac)
HGMKVVLISR

SEQ ID NO: 495 - protein, 9 aa, Homo sapiens
  MOD_RES (5)..(5): Lys(Ac)
LALQKQLTK

SEQ ID NO: 496 - protein, 9 aa, Homo sapiens
  MOD_RES (2)..(2): Lys(Ac)
NKYGDAFIR

SEQ ID NO: 497 - protein, 9 aa, Homo sapiens
  MOD_RES (2)..(2): Lys(Ac)
AKHDELTYF

SEQ ID NO: 498 - protein, 7 aa, Homo sapiens
  MOD_RES (2)..(2): Lys(Ac)
NKWFFQK

SEQ ID NO: 499 - protein, 10 aa, Homo sapiens
  MOD_RES (3)..(3): Lys(Ac)
LMKYGDSLYR

SEQ ID NO: 500 - protein, 11 aa, Homo sapiens
  MOD_RES (6)..(6): Lys(Ac)
LPSSTKSGWPR

SEQ ID NO: 501 - protein, 10 aa, Homo sapiens
  MOD_RES (8)..(8): Lys(Ac)
TLAMDVMKPR

SEQ ID NO: 502 - protein, 11 aa, Homo sapiens
  MOD_RES (7)..(7): Lys(Ac)
SAQEAYKSYIR

SEQ ID NO: 503 - protein, 14 aa, Homo sapiens
  MOD_RES (3)..(3): Lys(Ac)
AEKDEPGAWEETFK

SEQ ID NO: 504 - protein, 9 aa, Homo sapiens
  MOD_RES (6)..(6): Lys(Ac)
FSPDDKYSR

SEQ ID NO: 505 - protein, 13 aa, Homo sapiens
  MOD_RES (7)..(7): Lys(Ac)
LAAIVAKQVLLGR

SEQ ID NO: 506 - protein, 7 aa, Homo sapiens
  MOD_RES (3)..(3): Lys(Ac)
IDKPILK

SEQ ID NO: 507 - protein, 9 aa, Homo sapiens
  MOD_RES (5)..(5): Lys(Ac)
LVPLKETIK

SEQ ID NO: 508 - protein, 14 aa, Homo sapiens
  N-term Ac
  MOD_RES (8)..(8): Lys(Ac)
AEPVSPLKHFVLAK

SEQ ID NO: 509 - protein, 11 aa, Homo sapiens
  MOD_RES (5)..(5): Lys(Ac)
EEAIKFSEEQR

SEQ ID NO: 510 - protein, 10 aa, Homo sapiens
  MOD_RES (1)..(1): Lys(Ac)
KEELTLEGIR

SEQ ID NO: 511 - protein, 17 aa, Homo sapiens
  MOD_RES (5)..(5): Lys(Ac)
TLFVKGLSEDTTEETLK

SEQ ID NO: 512 - protein, 29 aa, Homo sapiens
  MOD_RES (6)..(6): Lys(Ac)
LIAGNKPVSFLTAQQLQQLQQQGQATQVR

SEQ ID NO: 513 - protein, 12 aa, Homo sapiens
  MOD_RES (3)..(3): Lys(Ac)
ALKYLVMDEADR

SEQ ID NO: 514 - protein, 9 aa, Homo sapiens
  MOD_RES (5)..(5): Lys(Ac)
LLLFKTFSR

SEQ ID NO: 515 - protein, 11 aa, Homo sapiens
  MOD_RES (6)..(6): Lys(Ac)
VLGTVKWFNVR

SEQ ID NO: 516 - protein, 10 aa, Homo sapiens
  MOD_RES (3)..(3): Lys(Ac)
TLKALEYVFK

SEQ ID NO: 517 - protein, 10 aa, Homo sapiens
  MOD_RES (4)..(4): Lys(Ac)
LMEKEINGSK

SEQ ID NO: 518 - protein, 12 aa, Homo sapiens
  MOD_RES (9)..(9): Lys(Ac)
AVDCLLDSKWAK

SEQ ID NO: 519 - protein, 12 aa, Homo sapiens
  MOD_RES (3)..(3): Lys(Ac)
GHKFHHTIGGSR

SEQ ID NO: 520 - protein, 7 aa, Homo sapiens
  MOD_RES (5)..(5): Lys(Ac)
VYVLKFK

SEQ ID NO: 521 - protein, 11 aa, Homo sapiens
  MOD_RES (9)..(9): Lys(Ac)
LSFISVGNKFK

SEQ ID NO: 522 - protein, 10 aa, Homo sapiens
  MOD_RES (7)..(7): Lys(Ac)
VITEEEKNFK

SEQ ID NO: 523 - protein, 12 aa, Homo sapiens
  MOD_RES (7)..(7): Lys(Ac)
TLVLSDKHSPQK

SEQ ID NO: 524 - protein, 9 aa, Homo sapiens
  MOD_RES (5)..(5): Lys(Ac)
SQFLKYIEK

SEQ ID NO: 525 - protein, 11 aa, Homo sapiens
  MOD_RES (7)..(7): Lys(Ac)
SEIINSKNFDR

SEQ ID NO: 526 - protein, 14 aa, Homo sapiens
  MOD_RES (3)..(3): Lys(Ac)
MQKEITALAPSTMK

SEQ ID NO: 527 - protein, 14 aa, Homo sapiens
  MOD_RES (10)..(10): Lys(Ac)
ETGYTYILPKNVLK

SEQ ID NO: 528 - protein, 8 aa, Homo sapiens
  MOD_RES (4)..(4): Lys(Ac)
LLNKHGIK

SEQ ID NO: 529 - protein, 8 aa, Homo sapiens
  MOD_RES (1)..(1): Lys(Ac)
KVLFTCFK

SEQ ID NO: 530 - protein, 14 aa, Homo sapiens
  MOD_RES (6)..(6): Lys(Ac)
DMCLEKDTLGLFLR

SEQ ID NO: 531 - protein, 11 aa, Homo sapiens
  MOD_RES (5)..(5): Lys(Ac)
IAAYKSILQER

SEQ ID NO: 532 - protein, 12 aa, Homo sapiens
  MOD_RES (11)..(11): Lys(Ac)
YAVLYQPLFDKR

SEQ ID NO: 533 - protein, 12 aa, Homo sapiens
  MOD_RES (5)..(5): Lys(Ac)
SHLAKEGLYQYK

SEQ ID NO: 534 - protein, 16 aa, Homo sapiens
  MOD_RES (10)..(10): Lys(Ac)
YKDAIHFYNKSLAEHR

SEQ ID NO: 535 - protein, 9 aa, Homo sapiens
  MOD_RES (4)..(4): Lys(Ac)
YIGKTMDYR

SEQ ID NO: 536 - protein, 13 aa, Homo sapiens
  MOD_RES (5)..(5): Lys(Ac)
GLCEKPLASAAAK

SEQ ID NO: 537 - protein, 10 aa, Homo sapiens
  MOD_RES (2)..(2): Lys(Ac)
GKFGNVYLAR

SEQ ID NO: 538 - protein, 11 aa, Homo sapiens
  MOD_RES (4)..(4): Lys(Ac)
LWSKAIFAGYK

SEQ ID NO: 539 - protein, 13 aa, Homo sapiens
  MOD_RES (9)..(9): Lys(Ac)
LQVLDPVPKPVIK

SEQ ID NO: 540 - protein, 10 aa, Homo sapiens
  MOD_RES (3)..(3): Lys(Ac)
ELKEIQYGIR

SEQ ID NO: 541 - protein, 9 aa, Homo sapiens
  MOD_RES (6)..(6): Lys(Ac)
GYPTIKFFR

SEQ ID NO: 542 - protein, 8 aa, Homo sapiens
  MOD_RES (7)..(7): Lys(Ac)
IHGVGFKK

SEQ ID NO: 543 - protein, 20 aa, Homo sapiens
  MOD_RES (7)..(7): Lys(Ac)
ISGASEKDIVHSGLAYTMER

SEQ ID NO: 544 - protein, 7 aa, Homo sapiens
  MOD_RES (2)..(2): Lys(Ac)
PKPLLFK

SEQ ID NO: 545 - protein, 11 aa, Homo sapiens
  MOD_RES (6)..(6): Lys(Ac)
FNNFLKALQEK

SEQ ID NO: 546 - protein, 9 aa, Homo sapiens
  MOD_RES (7)..(7): Lys(Ac)
AVDLIQKHK

SEQ ID NO: 547 - protein, 10 aa, Homo sapiens
  MOD_RES (7)..(7): Lys(Ac)
AEEILEKGLK

SEQ ID NO: 548 - protein, 16 aa, Homo sapiens
  MOD_RES (7)..(7): Lys(Ac)
LFDYFPKPYPNSEAAR

SEQ ID NO: 549 - protein, 10 aa, Homo sapiens
  MOD_RES (5)..(5): Lys(Ac)
AHLQKLMSDK

SEQ ID NO: 550 - protein, 11 aa, Homo sapiens
  MOD_RES (3)..(3): Lys(Ac)
TFKGVVDVVMK

SEQ ID NO: 551 - protein, 8 aa, Homo sapiens
  MOD_RES (7)..(7): Lys(Ac)
AAWEHMKK

SEQ ID NO: 552 - protein, 9 aa, Homo sapiens
  MOD_RES (8)..(8): Lys(Ac)
STVAQLVKR

SEQ ID NO: 553 - protein, 12 aa, Homo sapiens
  MOD_RES (5)..(5): Lys(Ac)
YNIEKDIAAHIK

SEQ ID NO: 554 - protein, 17 aa, Homo sapiens
  MOD_RES (5)..(5): Lys(Ac)
HFAFKMASGAANVVGPK

SEQ ID NO: 555 - protein, 13 aa, Homo sapiens
  MOD_RES (7)..(7): Lys(Ac)
TDFDKNKIWYEHR

SEQ ID NO: 556 - protein, 9 aa, Homo sapiens
  MOD_RES (5)..(5): Lys(Ac)
HGYIKGIVK

SEQ ID NO: 557 - protein, 17 aa, Homo sapiens
  MOD_RES (3)..(3): Lys(Ac)
FAKPVYPGQTLQTEMWK

SEQ ID NO: 558 - protein, 9 aa, Homo sapiens
  MOD_RES (8)..(8): Lys(Ac)
NCSSFLIKR

SEQ ID NO: 559 - protein, 12 aa, Homo sapiens
  MOD_RES (2)..(2): Lys(Ac)
NKIAGYVTHLMK

SEQ ID NO: 560 - protein, 8 aa, Homo sapiens
  MOD_RES (4)..(4): Lys(Ac)
  MOD_RES (7)..(7): Lys(Ac)
AVTKAQKK

SEQ ID NO: 561 - protein, 7 aa, Homo sapiens
  MOD_RES (2)..(2): Lys(Ac)
VKILFNK

SEQ ID NO: 562 - protein, 13 aa, Homo sapiens
  MOD_RES (2)..(2): Lys(Ac)
VKFIHDQTSPNPK

SEQ ID NO: 563 - protein, 8 aa, Homo sapiens
  MOD_RES (5)..(5): Lys(Ac)
YFDEKIAK

SEQ ID NO: 564 - protein, 8 aa, Homo sapiens
  MOD_RES (6)..(6): Lys(Ac)
LSLLSKFR

SEQ ID NO: 565 - protein, 7 aa, Homo sapiens
  MOD_RES (2)..(2): Lys(Ac)
VKNELFK

SEQ ID NO: 566 - protein, 12 aa, Homo sapiens
  MOD_RES (10)..(10): Lys(Ac)
EVGKDVSDEKLR

SEQ ID NO: 567 - protein, 12 aa, Homo sapiens
  MOD_RES (5)..(5): Lys(Ac)
SFLLKDSETSQR

SEQ ID NO: 568 - protein, 7 aa, Homo sapiens
  MOD_RES (4)..(4): Lys(Ac)
VFEKYGR

SEQ ID NO: 569 - protein, 16 aa, Homo sapiens
  MOD_RES (12)..(12): Lys(Ac)
NSNPALNDNLEKGLLK

SEQ ID NO: 570 - protein, 19 aa, Homo sapiens
  MOD_RES (9)..(9): Lys(Ac)
LAAFGQLHKVLGMDPLPSK

SEQ ID NO: 571 - protein, 11 aa, Homo sapiens
  MOD_RES (8)..(8): Lys(Ac)
DVSYQGGKSIK

SEQ ID NO: 572 - protein, 7 aa, Homo sapiens
  MOD_RES (5)..(5): Lys(Ac)
SIDLKDK

SEQ ID NO: 573 - protein, 7 aa, Homo sapiens
  MOD_RES (4)..(4): Lys(Ac)
MTDKCFR

SEQ ID NO: 574 - protein, 16 aa, Homo sapiens
  MOD_RES (8)..(8): Lys(Ac)
HAHGDQYKATDFVADR

SEQ ID NO: 575 - protein, 18 aa, Homo sapiens
  N-term Ac
  MOD_RES (12)..(12): Lys(Ac)
ACGLVASNLNLKPGECLR

SEQ ID NO: 576 - protein, 8 aa, Homo sapiens
  MOD_RES (6)..(6): Lys(Ac)
HVVFGKVK

SEQ ID NO: 577 - protein, 11 aa, Homo sapiens
  MOD_RES (6)..(6): Lys(Ac)
AVLIDKDQSPK

SEQ ID NO: 578 - protein, 11 aa, Homo sapiens
  MOD_RES (8)..(8): Lys(Ac)
YDDPEVQKDIK

SEQ ID NO: 579 - protein, 13 aa, Homo sapiens
  MOD_RES (5)..(5): Lys(Ac)
DDNGKPYVLPSVR

SEQ ID NO: 580 - protein, 10 aa, Homo sapiens
  MOD_RES (7)..(7): Lys(Ac)
AGEATVKFLK

SEQ ID NO: 581 - protein, 14 aa, Homo sapiens
  MOD_RES (10)..(10): Lys(Ac)
RNPDTQWITKPVHK

SEQ ID NO: 582 - protein, 10 aa, Homo sapiens
  MOD_RES (5)..(5): Lys(Ac)
LQDFKSFLLK

SEQ ID NO: 583 - protein, 14 aa, Homo sapiens
  MOD_RES (5)..(5): Lys(Ac)
EFALKHLPNDPMFK

SEQ ID NO: 584 - protein, 12 aa, Homo sapiens
  MOD_RES (7)..(7): Lys(Ac)
TACAINKVLMGR

SEQ ID NO: 585 - protein, 10 aa, Homo sapiens
  MOD_RES (3)..(3): Lys(Ac)
LMKYLLEQLK

SEQ ID NO: 586 - protein, 9 aa, Homo sapiens
  MOD_RES (7)..(7): Lys(Ac)
ASEIGEKYR

SEQ ID NO: 587 - protein, 8 aa, Homo sapiens
  MOD_RES (3)..(3): Lys(Ac)
ITKSDGIR

SEQ ID NO: 588 - protein, 12 aa, Homo sapiens
  MOD_RES (11)..(11): Lys(Ac)
ELEAENYHDIKR

SEQ ID NO: 589 - protein, 8 aa, Homo sapiens
  MOD_RES (5)..(5): Lys(Ac)
NLHSKWLK

SEQ ID NO: 590 - protein, 12 aa, Homo sapiens
  MOD_RES (7)..(7): Lys(Ac)
LTSLNVKYNNDK

SEQ ID NO: 591 - protein, 13 aa, Homo sapiens
  MOD_RES (4)..(4): Lys(Ac)
VASKQLEEEDGSR

SEQ ID NO: 592 - protein, 13 aa, Homo sapiens
  MOD_RES (7)..(7): Lys(Ac)
TAWLDGKHVVFGK

SEQ ID NO: 593 - protein, 7 aa, Homo sapiens
  MOD_RES (5)..(5): Lys(Ac)
VWNYKLR

SEQ ID NO: 594 - protein, 13 aa, Homo sapiens
  MOD_RES (1)..(1): Lys(Ac)
KNINCSIEESFQR

SEQ ID NO: 595 - protein, 9 aa, Homo sapiens
  MOD_RES (3)..(3): Lys(Ac)
YEKDIAAYR

SEQ ID NO: 596 - protein, 13 aa, Homo sapiens
  MOD_RES (3)..(3): Lys(Ac)
FYKDVLEVGELAK

SEQ ID NO: 597 - protein, 11 aa, Homo sapiens
  MOD_RES (3)..(3): Lys(Ac)
VVKQASEGPLK

SEQ ID NO: 598 - protein, 17 aa, Homo sapiens
  MOD_RES (8)..(8): Lys(Ac)
TSSAFVGKTPEASPEPK

SEQ ID NO: 599 - protein, 9 aa, Homo sapiens
  MOD_RES (7)..(7): Lys(Ac)
ADGIVSKNF

SEQ ID NO: 600 - protein, 10 aa, Homo sapiens
  MOD_RES (8)..(8): Lys(Ac)
ISEQSDAKLK

SEQ ID NO: 601 - protein, 7 aa, Homo sapiens
  MOD_RES (1)..(1): Lys(Ac)
KSSETLR

SEQ ID NO: 602 - protein, 8 aa, Homo sapiens
  MOD_RES (6)..(6): Lys(Ac)
SGLLDKWK

SEQ ID NO: 603 - protein, 10 aa, Homo sapiens
  MOD_RES (5)..(5): Lys(Ac)
LNLDKMMEQK

SEQ ID NO: 604 - protein, 8 aa, Homo sapiens
  MOD_RES (3)..(3): Lys(Ac)
LAKYFFNK

SEQ ID NO: 605 - protein, 8 aa, Homo sapiens
  MOD_RES (7)..(7): Lys(Ac)
NSFDCFKK

SEQ ID NO: 606 - protein, 11 aa, Homo sapiens
  MOD_RES (5)..(5): Lys(Ac)
AGTFKMVFTPK

SEQ ID NO: 607 - protein, 8 aa, Homo sapiens
  MOD_RES (5)..(5): Lys(Ac)
SLNLKHIK

SEQ ID NO: 608 - protein, 13 aa, Homo sapiens
  MOD_RES (7)..(7): Lys(Ac)
DHCVAHKLFNNLK

SEQ ID NO: 609 - protein, 7 aa, Homo sapiens
  MOD_RES (3)..(3): Lys(Ac)
NVKFVLK

SEQ ID NO: 610 - protein, 14 aa, Homo sapiens
  MOD_RES (10)..(10): Lys(Ac)
VLTVINQTQKENLR

SEQ ID NO: 611 - protein, 10 aa, Homo sapiens
  MOD_RES (3)..(3): Lys(Ac)
GAKPVVVLQK

SEQ ID NO: 612 - protein, 12 aa, Homo sapiens
  MOD_RES (4)..(4): Lys(Ac)
ELEKVCNPIITK

SEQ ID NO: 613 - protein, 11 aa, Homo sapiens
  MOD_RES (7)..(7): Lys(Ac)
IHDVLCKLVEK

SEQ ID NO: 614 - protein, 7 aa, Homo sapiens
  MOD_RES (1)..(1): Lys(Ac)
KFAYLGR

SEQ ID NO: 615 - protein, 12 aa, Homo sapiens
  MOD_RES (2)..(2): Lys(Ac)
  MOD_RES (4)..(4): Lys(Ac)
SKGKNSDEEAPK

SEQ ID NO: 616 - protein, 9 aa, Homo sapiens
  MOD_RES (1)..(1): Lys(Ac)
KEYVFADSK

SEQ ID NO: 617 - protein, 11 aa, Homo sapiens
  MOD_RES (9)..(9): Lys(Ac)
EIAENALGKHK

SEQ ID NO: 618 - protein, 7 aa, Homo sapiens
  MOD_RES (3)..(3): Lys(Ac)
FQKELER

SEQ ID NO: 619 - protein, 15 aa, Homo sapiens
  MOD_RES (10)..(10): Lys(Ac)
GFSLLATEDKEALKK

SEQ ID NO: 620 - protein, 27 aa, Homo sapiens
  MOD_RES (21)..(21): Lys(Ac)
VIISAPSADAPMFVMGVNHEKYDNSLK

SEQ ID NO: 621 - protein, 11 aa, Homo sapiens
  MOD_RES (7)..(7): Lys(Ac)
GAGTDEKTLTR

SEQ ID NO: 622 - protein, 7 aa, Homo sapiens
  MOD_RES (5)..(5): Lys(Ac)
GPLDKWR

SEQ ID NO: 623 - protein, 21 aa, Homo sapiens
  MOD_RES (7)..(7): Lys(Ac)
EFHQAGKPIGLCCIAPVLAAK

SEQ ID NO: 624 - protein, 8 aa, Homo sapiens
  MOD_RES (6)..(6): Lys(Ac)
TTLLYKLK

SEQ ID NO: 625 - protein, 13 aa, Homo sapiens
  MOD_RES (5)..(5): Lys(Ac)
VPNDKYYGAQTVR

SEQ ID NO: 626 - protein, 14 aa, Homo sapiens
  MOD_RES (13)..(13): Lys(Ac)
ADTLTPEECQQFKK

SEQ ID NO: 627 - protein, 10 aa, Homo sapiens
  MOD_RES (4)..(4): Lys(Ac)
AFAKELFLGK

SEQ ID NO: 628 - protein, 12 aa, Homo sapiens
  MOD_RES (6)..(6): Lys(Ac)
SYVSEKDVTSAK

SEQ ID NO: 629 - protein, 7 aa, Homo sapiens
  MOD_RES (4)..(4): Lys(Ac)
LIGKQGR

SEQ ID NO: 630 - protein, 14 aa, Homo sapiens
  MOD_RES (7)..(7): Lys(Ac)
EHTALLKIEGVYAR

SEQ ID NO: 631 - protein, 10 aa, Homo sapiens
  MOD_RES (8)..(8): Lys(Ac)
FNDGSDEKKK

SEQ ID NO: 632 - protein, 14 aa, Homo sapiens
  MOD_RES (3)..(3): Lys(Ac)
FSKSQLDIIIHSLK

SEQ ID NO: 633 - protein, 13 aa, Homo sapiens
  MOD_RES (9)..(9): Lys(Ac)
LTCEEEEEKIFGR

SEQ ID NO: 634 - protein, 11 aa, Homo sapiens
  MOD_RES (7)..(7): Lys(Ac)
NDEELNKLLGR

SEQ ID NO: 635 - protein, 11 aa, Homo sapiens
  MOD_RES (8)..(8): Lys(Ac)
ALEAVFGKYGR

SEQ ID NO: 636 - protein, 15 aa, Homo sapiens
  MOD_RES (3)..(3): Lys(Ac)
TFKTVFAEHISDECK

SEQ ID NO: 637 - protein, 12 aa, Homo sapiens
  MOD_RES (2)..(2): Lys(Ac)
YKPESEELTAER

SEQ ID NO: 638 - protein, 11 aa, Homo sapiens
  MOD_RES (4)..(4): Lys(Ac)
NAEKYAEEDRR

SEQ ID NO: 639 - protein, 12 aa, Homo sapiens
  MOD_RES (10)..(10): Lys(Ac)
SKSDPIMLLKDR

SEQ ID NO: 640 - protein, 8 aa, Homo sapiens
  MOD_RES (5)..(5): Lys(Ac)
GVDPKFLR

SEQ ID NO: 641 - protein, 9 aa, Homo sapiens
  MOD_RES (3)..(3): Lys(Ac)
LIKDGLIIR

SEQ ID NO: 642 - protein, 7 aa, Homo sapiens
  MOD_RES (5)..(5): Lys(Ac)
HLLPKIR

SEQ ID NO: 643 - protein, 8 aa, Homo sapiens
  MOD_RES (3)..(3): Lys(Ac)
LGKPSLVR

SEQ ID NO: 644 - protein, 8 aa, Homo sapiens
  MOD_RES (5)..(5): Lys(Ac)
EQIYKLAK

SEQ ID NO: 645 - protein, 8 aa, Homo sapiens
  MOD_RES (6)..(6): Lys(Ac)
VEYFLKWK

SEQ ID NO: 646 - protein, 8 aa, Homo sapiens
  MOD_RES (3)..(3): Lys(Ac)
HYKTDFDK

SEQ ID NO: 647 - protein, 17 aa, Homo sapiens
  MOD_RES (9)..(9): Lys(Ac)
EGYAWAEDKEHCEEYGR

SEQ ID NO: 648 - protein, 11 aa, Homo sapiens
  MOD_RES (8)..(8): Lys(Ac)
LAYIAHPKLGK

SEQ ID NO: 649 - protein, 14 aa, Homo sapiens
  MOD_RES (9)..(9): Lys(Ac)
IFSQETLTKAQILK

SEQ ID NO: 650 - protein, 14 aa, Homo sapiens
  MOD_RES (11)..(11): Lys(Ac)
ALTGGIAHLFKQNK

SEQ ID NO: 651 - protein, 7 aa, Homo sapiens
  MOD_RES (4)..(4): Lys(Ac)
FYVKDHR

SEQ ID NO: 652 - protein, 10 aa, Homo sapiens
  MOD_RES (6)..(6): Lys(Ac)
SPVNTKSLFK

SEQ ID NO: 653 - protein, 7 aa, Homo sapiens
  MOD_RES (4)..(4): Lys(Ac)
HIVKEFK

SEQ ID NO: 654 - protein, 12 aa, Homo sapiens
  MOD_RES (8)..(8): Lys(Ac)
MYKEEGLKAFYK

SEQ ID NO: 655 - protein, 11 aa, Homo sapiens
  MOD_RES (6)..(6): Lys(Ac)
LDAQVKELVLK

SEQ ID NO: 656 - protein, 16 aa, Homo sapiens
  MOD_RES (6)..(6): Lys(Ac)
GYPTLKLFKPGQEAVK

SEQ ID NO: 657 - protein, 13 aa, Homo sapiens
  MOD_RES (10)..(10): Lys(Ac)
EVCFACVDGKEFR

SEQ ID NO: 658 - protein, 9 aa, Homo sapiens
  MOD_RES (2)..(2): Lys(Ac)
YKEALEQCR

SEQ ID NO: 659 - protein, 9 aa, Homo sapiens
  MOD_RES (6)..(6): Lys(Ac)
YELTGKFER

SEQ ID NO: 660 - protein, 7 aa, Homo sapiens
  MOD_RES (3)..(3): Lys(Ac)
FIKIDGK

SEQ ID NO: 661 - protein, 11 aa, Homo sapiens
  MOD_RES (5)..(5): Lys(Ac)
LAMVKAEPDVK

SEQ ID NO: 662 - protein, 7 aa, Homo sapiens
  MOD_RES (3)..(3): Lys(Ac)
NEKLFYR

SEQ ID NO: 663 - protein, 9 aa, Homo sapiens
  MOD_RES (1)..(1): Lys(Ac)
KFVCPECSK

SEQ ID NO: 664 - protein, 10 aa, Homo sapiens
  MOD_RES (8)..(8): Lys(Ac)
DLSLDDFKGK

SEQ ID NO: 665 - protein, 13 aa, Homo sapiens
  MOD_RES (8)..(8): Lys(Ac)
DLTDYLMKILTER

SEQ ID NO: 666 - protein, 12 aa, Homo sapiens
  MOD_RES (9)..(9): Lys(Ac)
HGASPELQKQIR

SEQ ID NO: 667 - protein, 11 aa, Homo sapiens
  MOD_RES (5)..(5): Lys(Ac)
LNQLKPGLQYK

SEQ ID NO: 668 - protein, 9 aa, Homo sapiens
  MOD_RES (3)..(3): Lys(Ac)
ISKLYGDLK

SEQ ID NO: 669 - protein, 12 aa, Homo sapiens
  MOD_RES (7)..(7): Lys(Ac)
LTSDDVKEQIYK

SEQ ID NO: 670 - protein, 23 aa, Homo sapiens
  MOD_RES (8)..(8): Lys(Ac)
SCNCLLLKVNQIGSVTESLQACK

SEQ ID NO: 671 - protein, 16 aa, Homo sapiens
  MOD_RES (12)..(12): Lys(Ac)
VTCIDPNPNFEKFLIK

SEQ ID NO: 672 - protein, 18 aa, Homo sapiens
  MOD_RES (15)..(15): Lys(Ac)
LILGLMMPPAHYDAKQLK

SEQ ID NO: 673 - protein, 14 aa, Homo sapiens
  MOD_RES (3)..(3): Lys(Ac)
EVKLLLLGAGESGK

SEQ ID NO: 674 - protein, 13 aa, Homo sapiens
  MOD_RES (11)..(11): Lys(Ac)
EAKPDELMDSKLR

SEQ ID NO: 675 - protein, 8 aa, Homo sapiens
  MOD_RES (6)..(6): Lys(Ac)
YNWSAKAK

SEQ ID NO: 676 - protein, 10 aa, Homo sapiens
  MOD_RES (3)..(3): Lys(Ac)
GNKPWISLPR

SEQ ID NO: 677 - protein, 12 aa, Homo sapiens
  MOD_RES (10)..(10): Lys(Ac)
EVVEAHVDQKNK

SEQ ID NO: 678 - protein, 8 aa, Homo sapiens
  MOD_RES (5)..(5): Lys(Ac)
LENDKSFR

SEQ ID NO: 679 - protein, 8 aa, Homo sapiens
  MOD_RES (5)..(5): Lys(Ac)
LVAMKFLR

SEQ ID NO: 680 - protein, 13 aa, Homo sapiens
  MOD_RES (6)..(6): Lys(Ac)
KVPFGKTYCCDLK

SEQ ID NO: 681 - protein, 12 aa, Homo sapiens
  MOD_RES (2)..(2): Lys(Ac)
TKFVDGVSTVAR

SEQ ID NO: 682 - protein, 23 aa, Homo sapiens
  MOD_RES (8)..(8): Lys(Ac)
LAQLEEAKQASIQHIQNAIDTEK

SEQ ID NO: 683 - protein, 14 aa, Homo sapiens
  MOD_RES (7)..(7): Lys(Ac)
IPVPVQKNIDQQIK

SEQ ID NO: 684 - protein, 13 aa, Homo sapiens
  MOD_RES (12)..(12): Lys(Ac)
YQLDKDGVVLFKK

SEQ ID NO: 685 - protein, 14 aa, Homo sapiens
  MOD_RES (9)..(9): Lys(Ac)
VDIRPQLLKNALQR

SEQ ID NO: 686 - protein, 10 aa, Homo sapiens
  MOD_RES (3)..(3): Lys(Ac)
NQKLTATTQK

SEQ ID NO: 687 - protein, 10 aa, Homo sapiens
  MOD_RES (3)..(3): Lys(Ac)
YYKNIGLGFK

SEQ ID NO: 688 - protein, 9 aa, Homo sapiens
  MOD_RES (3)..(3): Lys(Ac)
SGKYDLDFK

SEQ ID NO: 689 - protein, 9 aa, Homo sapiens
  MOD_RES (6)..(6): Lys(Ac)
LYGDLKHLK

SEQ ID NO: 690 - protein, 16 aa, Homo sapiens
  MOD_RES (7)..(7): Lys(Ac)
VENEAEKDLQCHAPVR

SEQ ID NO: 691 - protein, 15 aa, Homo sapiens
  MOD_RES (5)..(5): Lys(Ac)
DSLYKDAMQYASESK

SEQ ID NO: 692 - protein, 10 aa, Homo sapiens
  MOD_RES (5)..(5): Lys(Ac)
TISAKYAEER

SEQ ID NO: 693 - protein, 9 aa, Homo sapiens
  N-term Ac
  MOD_RES (4)..(4): Lys(Ac)
ASNKTTLQK

SEQ ID NO: 694 - protein, 13 aa, Homo sapiens
  MOD_RES (8)..(8): Lys(Ac)
GYLADPAKFPEAR

SEQ ID NO: 695 - protein, 10 aa, Homo sapiens
  MOD_RES (5)..(5): Lys(Ac)
SCEIKFLTFK

SEQ ID NO: 696 - protein, 7 aa, Homo sapiens
  MOD_RES (4)..(4): Lys(Ac)
SELKHAK

SEQ ID NO: 697 - protein, 10 aa, Homo sapiens
  MOD_RES (7)..(7): Lys(Ac)
SCGLNPKLEK

SEQ ID NO: 698 - protein, 10 aa, Homo sapiens
  MOD_RES (3)..(3): Lys(Ac)
EVKVLLDQLR

SEQ ID NO: 699 - protein, 8 aa, Homo sapiens
  MOD_RES (5)..(5): Lys(Ac)
KAVTKVQK

SEQ ID NO: 700 - protein, 8 aa, Homo sapiens
  MOD_RES (4)..(4): Lys(Ac)
ILQKQGFK

SEQ ID NO: 701 - protein, 8 aa, Homo sapiens
  MOD_RES (2)..(2): Lys(Ac)
NKFGAPQK

SEQ ID NO: 702 - protein, 11 aa, Homo sapiens
  MOD_RES (6)..(6): Lys(Ac)
VTAVHKANIMK

SEQ ID NO: 703 - protein, 10 aa, Homo sapiens
  MOD_RES (5)..(5): Lys(Ac)
ACPEKHFAFK

SEQ ID NO: 704 - protein, 14 aa, Homo sapiens
  MOD_RES (6)..(6): Lys(Ac)
KPTLDKPSPETFVK

SEQ ID NO: 705 - protein, 10 aa, Homo sapiens
  MOD_RES (5)..(5): Lys(Ac)
QLAQKYNCDK

SEQ ID NO: 706 - protein, 14 aa, Homo sapiens
  MOD_RES (10)..(10): Lys(Ac)
YTAQVDAEEKEDVK

SEQ ID NO: 707 - protein, 14 aa, Homo sapiens
  MOD_RES (10)..(10): Lys(Ac)
PLISPQTSHKTLSK

SEQ ID NO: 708 - protein, 10 aa, Homo sapiens
  MOD_RES (3)..(3): Lys(Ac)
ADKLAEEHSS

SEQ ID NO: 709 - protein, 9 aa, Homo sapiens
  MOD_RES (7)..(7): Lys(Ac)
DFGSFDKFK

SEQ ID NO: 710 - protein, 10 aa, Homo sapiens
  MOD_RES (4)..(4): Lys(Ac)
KIDKYTEVLK

SEQ ID NO: 711 - protein, 14 aa, Homo sapiens
  MOD_RES (3)..(3): Lys(Ac)
  MOD_RES (9)..(9): Lys(Ac)
CSKLPSSTKSGWPR

SEQ ID NO: 712 - protein, 8 aa, Homo sapiens
  MOD_RES (5)..(5): Lys(Ac)
KAINKAQK

SEQ ID NO: 713 - protein, 10 aa, Homo sapiens
  MOD_RES (5)..(5): Lys(Ac)
EFPEKQELHR

SEQ ID NO: 714 - protein, 16 aa, Homo sapiens
  MOD_RES (5)..(5): Lys(Ac)
TDLEKDIISDTSGDFR

SEQ ID NO: 715 - protein, 15 aa, Homo sapiens
  MOD_RES (11)..(11): Lys(Ac)
TPAQYDASELKASMK

SEQ ID NO: 716 - protein, 9 aa, Homo sapiens
  MOD_RES (7)..(7): Lys(Ac)
LTCYLCKQK

SEQ ID NO: 717 - protein, 8 aa, Homo sapiens
  MOD_RES (4)..(4): Lys(Ac)
  MOD_RES (7)..(7): Lys(Ac)
AINKAQKK

SEQ ID NO: 718 - protein, 11 aa, Homo sapiens
  MOD_RES (5)..(5): Lys(Ac)
KGIEKNLGIGK

SEQ ID NO: 719 - protein, 15 aa, Homo sapiens
  MOD_RES (4)..(4): Lys(Ac)
DNGKHALIIYDDLSK

SEQ ID NO: 720 - protein, 11 aa, Homo sapiens
  MOD_RES (8)..(8): Lys(Ac)
QLYNIYAKHTK

SEQ ID NO: 721 - protein, 10 aa, Homo sapiens
  MOD_RES (5)..(5): Lys(Ac)
GKGDKAQIEK

SEQ ID NO: 722 - protein, 8 aa, Homo sapiens
  MOD_RES (1)..(1): Lys(Ac)
KFLVHNVK

SEQ ID NO: 723 - protein, 8 aa, Homo sapiens
  MOD_RES (4)..(4): Lys(Ac)
GLIKLVSK

SEQ ID NO: 724 - protein, 10 aa, Homo sapiens
  MOD_RES (6)..(6): Lys(Ac)
IGFAEKVAAK

SEQ ID NO: 725 - protein, 10 aa, Homo sapiens
  N-term Ac
  MOD_RES (3)..(3): Lys(Ac)
AEKFDCHYCR

SEQ ID NO: 726 - protein, 16 aa, Homo sapiens
  MOD_RES (12)..(12): Lys(Ac)
GALPLDTVTFYKVIPK

SEQ ID NO: 727 - protein, 14 aa, Homo sapiens
  MOD_RES (10)..(10): Lys(Ac)
HWGGNVLGPKSVAR

SEQ ID NO: 728 - protein, 9 aa, Homo sapiens
  MOD_RES (5)..(5): Lys(Ac)
TITMKQLLR

SEQ ID NO: 729 - protein, 7 aa, Homo sapiens
  MOD_RES (2)..(2): Lys(Ac)
SKFVLVK

SEQ ID NO: 730 - protein, 10 aa, Homo sapiens
  MOD_RES (6)..(6): Lys(Ac)
LVEDTKHRPK

SEQ ID NO: 731 - protein, 12 aa, Homo sapiens
  MOD_RES (7)..(7): Lys(Ac)
TVGQLYKEQLAK

SEQ ID NO: 732 - protein, 12 aa, Homo sapiens
  MOD_RES (9)..(9): Lys(Ac)
AAETCQEPKEFR

SEQ ID NO: 733 - protein, 17 aa, Homo sapiens
  MOD_RES (11)..(11): Lys(Ac)
VVLIGDSGVGKSNLLSR

SEQ ID NO: 734 - protein, 9 aa, Homo sapiens
  MOD_RES (3)..(3): Lys(Ac)
SGKYVLGYK

SEQ ID NO: 735 - protein, 10 aa, Homo sapiens
  MOD_RES (8)..(8): Lys(Ac)
ILMEHIHKLK

SEQ ID NO: 736 - protein, 9 aa, Homo sapiens
  MOD_RES (2)..(2): Lys(Ac)
EKVFYSLMR

SEQ ID NO: 737 - protein, 10 aa, Homo sapiens
  MOD_RES (1)..(1): Lys(Ac)
KFDQLLAEEK

SEQ ID NO: 738 - protein, 11 aa, Homo sapiens
  MOD_RES (7)..(7): Lys(Ac)
FVEFDMKPVCK

SEQ ID NO: 739 - protein, 9 aa, Homo sapiens
  MOD_RES (1)..(1): Lys(Ac)
KGFITVDGR

SEQ ID NO: 740 - protein, 13 aa, Homo sapiens
  MOD_RES (9)..(9): Lys(Ac)
KAEAQIAAKNLDK

SEQ ID NO: 741 - protein, 7 aa, Homo sapiens
  MOD_RES (2)..(2): Lys(Ac)
DKQFVAK

SEQ ID NO: 742 - protein, 13 aa, Homo sapiens
  MOD_RES (9)..(9): Lys(Ac)
AGACNTVIKQLMR

SEQ ID NO: 743 - protein, 13 aa, Homo sapiens
  MOD_RES (5)..(5): Lys(Ac)
KQQAKFDECVLDK

SEQ ID NO: 744 - protein, 12 aa, Homo sapiens
  MOD_RES (7)..(7): Lys(Ac)
ALCTGEKGFGYK

SEQ ID NO: 745 - protein, 8 aa, Homo sapiens
  MOD_RES (3)..(3): Lys(Ac)
IYKSDGIK

SEQ ID NO: 746 - protein, 9 aa, Homo sapiens
  MOD_RES (5)..(5): Lys(Ac)
DEGGKAFFK

SEQ ID NO: 747 - protein, 7 aa, Homo sapiens
  MOD_RES (4)..(4): Lys(Ac)
SYLKEFR

SEQ ID NO: 748 - protein, 9 aa, Homo sapiens
  MOD_RES (3)..(3): Lys(Ac)
VPKTAENFR

SEQ ID NO: 749 - protein, 10 aa, Homo sapiens
  MOD_RES (6)..(6): Lys(Ac)
VNCLDKFWHK

SEQ ID NO: 750 - protein, 10 aa, Homo sapiens
  MOD_RES (7)..(7): Lys(Ac)
KGEDFVKTLK

SEQ ID NO: 751 - protein, 10 aa, Homo sapiens
  MOD_RES (6)..(6): Lys(Ac)
EAEFTKSIAK

SEQ ID NO: 752 - protein, 9 aa, Homo sapiens
  MOD_RES (5)..(5): Lys(Ac)
SGYYKVLGK

SEQ ID NO: 753 - protein, 10 aa, Homo sapiens
  MOD_RES (6)..(6): Lys(Ac)
YVLGYKQTLK

SEQ ID NO: 754 - protein, 12 aa, Homo sapiens
  MOD_RES (4)..(4): Lys(Ac)
FEDKTVAYTEQK

SEQ ID NO: 755 - protein, 11 aa, Homo sapiens
  MOD_RES (6)..(6): Lys(Ac)
IVNALKSQVDK

SEQ ID NO: 756 - protein, 9 aa, Homo sapiens
  MOD_RES (8)..(8): Lys(Ac)
ILEFFGLKK

SEQ ID NO: 757 - protein, 11 aa, Homo sapiens
  MOD_RES (8)..(8): Lys(Ac)
LCGQDLNKTSR

SEQ ID NO: 758 - protein, 9 aa, Homo sapiens
  MOD_RES (4)..(4): Lys(Ac)
VYFKDTHPK

SEQ ID NO: 759 - protein, 10 aa, Homo sapiens
  MOD_RES (4)..(4): Lys(Ac)
ILSKLSEETK

SEQ ID NO: 760 - protein, 10 aa, Homo sapiens
  MOD_RES (4)..(4): Lys(Ac)
ATWKSNYFLK

SEQ ID NO: 761 - protein, 11 aa, Homo sapiens
  MOD_RES (9)..(9): Lys(Ac)
AVDSQILPKIK

SEQ ID NO: 762 - protein, 10 aa, Homo sapiens
  MOD_RES (2)..(2): Lys(Ac)
EKLQEEMLQR

SEQ ID NO: 763 - protein, 12 aa, Homo sapiens
  MOD_RES (7)..(7): Lys(Ac)
MIYASSKDAIKK

SEQ ID NO: 764 - protein, 11 aa, Homo sapiens
  MOD_RES (8)..(8): Lys(Ac)
YNDPIYVKLEK

SEQ ID NO: 765 - protein, 19 aa, Homo sapiens
  MOD_RES (11)..(11): Lys(Ac)
VTDDLVCLVYKTDQAQDVK

SEQ ID NO: 766 - protein, 9 aa, Homo sapiens
  MOD_RES (5)..(5): Lys(Ac)
TVVNKDVFR

SEQ ID NO: 767 - protein, 12 aa, Homo sapiens
  MOD_RES (10)..(10): Lys(Ac)
NLQEAEEWYKSK

SEQ ID NO: 768 - protein, 8 aa, Homo sapiens
  MOD_RES (1)..(1): Lys(Ac)
KFGGPGAR

SEQ ID NO: 769 - protein, 16 aa, Homo sapiens
  MOD_RES (11)..(11): Lys(Ac)
LLLLGAGESGKSTIVK

SEQ ID NO: 770 - protein, 15 aa, Homo sapiens
  MOD_RES (4)..(4): Lys(Ac)
SFVKVYNYNHLMPTR

SEQ ID NO: 771 - protein, 7 aa, Homo sapiens
  MOD_RES (3)..(3): Lys(Ac)
YVKALFR

SEQ ID NO: 772 - protein, 8 aa, Homo sapiens
  MOD_RES (5)..(5): Lys(Ac)
LEPLKPLK

SEQ ID NO: 773 - protein, 14 aa, Homo sapiens
  MOD_RES (4)..(4): Lys(Ac)
VGDKVLLPEYGGTK

SEQ ID NO: 774 - protein, 10 aa, Homo sapiens
  MOD_RES (7)..(7): Lys(Ac)
GGVVGIKVDK

SEQ ID NO: 775 - protein, 8 aa, Homo sapiens
  MOD_RES (4)..(4): Lys(Ac)
VAFKYCQK

SEQ ID NO: 776 - protein, 11 aa, Homo sapiens
  MOD_RES (7)..(7): Lys(Ac)
SVPHLQKVFDR

SEQ ID NO: 777 - protein, 7 aa, Homo sapiens
  MOD_RES (3)..(3): Lys(Ac)
VYKEMYK

SEQ ID NO: 778 - protein, 9 aa, Homo sapiens
  MOD_RES (6)..(6): Lys(Ac)
SELTGKFEK

SEQ ID NO: 779 - protein, 8 aa, Homo sapiens
  MOD_RES (5)..(5): Lys(Ac)
EFIEKYDK

SEQ ID NO: 780 - protein, 20 aa, Homo sapiens
  MOD_RES (5)..(5): Lys(Ac)
ESCSKHASGTSFHLPQPSFR

SEQ ID NO: 781 - protein, 13 aa, Homo sapiens
  MOD_RES (12)..(12): Lys(Ac)
KAEAAVVAVAEKR

SEQ ID NO: 782 - protein, 7 aa, Homo sapiens
  MOD_RES (3)..(3): Lys(Ac)
VNKEVER

SEQ ID NO: 783 - protein, 13 aa, Homo sapiens
  MOD_RES (9)..(9): Lys(Ac)
GFSIPECQKLLPK

SEQ ID NO: 784 - protein, 9 aa, Homo sapiens
  MOD_RES (6)..(6): Lys(Ac)
QNIILKNDK

SEQ ID NO: 785 - protein, 12 aa, Homo sapiens
  MOD_RES (6)..(6): Lys(Ac)
NEEATKHLECTK

SEQ ID NO: 786 - protein, 9 aa, Homo sapiens
  MOD_RES (3)..(3): Lys(Ac)
  MOD_RES (7)..(7): Lys(Ac)
AGKDSGKAK

SEQ ID NO: 787 - protein, 16 aa, Homo sapiens
  MOD_RES (3)..(3): Lys(Ac)
ESKALMGLYHGQVLCK

SEQ ID NO: 788 - protein, 9 aa, Homo sapiens
  MOD_RES (6)..(6): Lys(Ac)
FGAPQKDVK

SEQ ID NO: 789 - protein, 10 aa, Homo sapiens
  MOD_RES (9)..(9): Lys(Ac)
ILQEGVDPKK

SEQ ID NO: 790 - protein, 8 aa, Homo sapiens
  MOD_RES (3)..(4): Lys(Ac)
GSKKAITK

SEQ ID NO: 791 - protein, 12 aa, Homo sapiens
  MOD_RES (5)..(5): Lys(Ac)
  MOD_RES (11)..(11): Lys(Ac)
PEPTKSAPAPKK

SEQ ID NO: 792 - protein, 8 aa, Homo sapiens
  MOD_RES (3)..(4): Lys(Ac)
GSKKAINK

SEQ ID NO: 793 - protein, 8 aa, Homo sapiens
  MOD_RES (1)..(1): Lys(Ac)
  MOD_RES (5)..(5): Lys(Ac)
KAINKAQK

SEQ ID NO: 794 - protein, 8 aa, Homo sapiens
  MOD_RES (1)..(1): Lys(Ac)
  MOD_RES (5)..(5): Lys(Ac)
KAVTKAQK

SEQ ID NO: 795 - protein, 12 aa, Homo sapiens
  MOD_RES (5)..(5): Lys(Ac)
PEPAKSAPAPKK

SEQ ID NO: 796 - protein, 9 aa, Homo sapiens
  MOD_RES (1)..(1): Lys(Ac)
  MOD_RES (6)..(6): Lys(Ac)
KQLATKAAR

SEQ ID NO: 797 - protein, 24 aa, Homo sapiens
  MOD_RES (8)..(8): Lys(Ac)
TEMDWVLKHSGPNSADSANDGFVR

SEQ ID NO: 798 - protein, 9 aa, Homo sapiens
  MOD_RES (5)..(5): Lys(Ac)
ADLIKQYGR

SEQ ID NO: 799 - protein, 10 aa, Homo sapiens
  MOD_RES (7)..(7): Lys(Ac)
FYEQFSKNIK

SEQ ID NO: 800 - protein, 12 aa, Homo sapiens
  MOD_RES (3)..(3): Lys(Ac)
LMKICMNEDPAK

SEQ ID NO: 801 - protein, 14 aa, Homo sapiens
  N-term Ac
  MOD_RES (10)..(10): Lys(Ac)
ASPSLERPEKGAGK

SEQ ID NO: 802 - protein, 9 aa, Homo sapiens
  MOD_RES (7)..(7): Lys(Ac)
INKALDKTK

SEQ ID NO: 803 - protein, 16 aa, Homo sapiens
  MOD_RES (6)..(6): Lys(Ac)
IANILKDKDPPIPVAK

SEQ ID NO: 804 - protein, 13 aa, Homo sapiens
  MOD_RES (10)..(10): Lys(Ac)
NTEDLQCYVKPTK

SEQ ID NO: 805 - protein, 9 aa, Homo sapiens
  MOD_RES (5)..(5): Lys(Ac)
VDEVKSTIK

SEQ ID NO: 806 - protein, 9 aa, Homo sapiens
  MOD_RES (4)..(4): Lys(Ac)
KLQKAALLK

SEQ ID NO: 807 - protein, 14 aa, Homo sapiens
  MOD_RES (9)..(9): Lys(Ac)
YSVDIPLDKTVVNK

SEQ ID NO: 808 - protein, 8 aa, Homo sapiens
  MOD_RES (3)..(3): Lys(Ac)
LNKAVWAK

SEQ ID NO: 809 - protein, 7 aa, Homo sapiens
  MOD_RES (1)..(1): Lys(Ac)
KFGQGSR

SEQ ID NO: 810 - protein, 9 aa, Homo sapiens
  MOD_RES (4)..(4): Lys(Ac)
DQTKSIVEK

SEQ ID NO: 811 - protein, 8 aa, Homo sapiens
  MOD_RES (4)..(4): Lys(Ac)
YMVKSCGK

SEQ ID NO: 812 - protein, 19 aa, Homo sapiens
  MOD_RES (8)..(8): Lys(Ac)
LAHEVGWKYQAVTATLEEK

SEQ ID NO: 813 - protein, 8 aa, Homo sapiens
  MOD_RES (4)..(4): Lys(Ac)
ALEKIDLK

SEQ ID NO: 814 - protein, 14 aa, Homo sapiens
  MOD_RES (5)..(5): Lys(Ac)
  MOD_RES (8)..(8): Lys(Ac)
AMMEKLVKSISQLK

SEQ ID NO: 815 - protein, 11 aa, Homo sapiens
  MOD_RES (6)..(6): Lys(Ac)
LLGITKECVMR

SEQ ID NO: 816 - protein, 7 aa, Homo sapiens
  MOD_RES (2)..(2): Lys(Ac)
  MOD_RES (4)..(4): Lys(Ac)
GKGKAGR

SEQ ID NO: 817 - protein, 17 aa, Homo sapiens
  MOD_RES (14)..(14): Lys(Ac)
LGDVISIQPCPDVKYGK

SEQ ID NO: 818 - protein, 9 aa, Homo sapiens
REDIFYTSK

SEQ ID NO: 819 - protein, 22 aa, Homo sapiens
LNDGHFMPVLGFGTYAPPEVPR

SEQ ID NO: 820 - protein, 22 aa, Homo sapiens
NLHYFNSDSFASHPNYPYSDEY

SEQ ID NO: 821 - protein, 8 aa, Homo sapiens
TPALIALR

SEQ ID NO: 822 - protein, 20 aa, Homo sapiens
WVDPNSPVLLEDPVLCALAK

SEQ ID NO: 823 - protein, 17 aa, Homo sapiens
PDSGNPLDTVLKVNFHM

SEQ ID NO: 824 - protein, 11 aa, Homo sapiens
LLVADQDFSFK

SEQ ID NO: 825 - protein, 12 aa, Homo sapiens
NILDLVNEFPEK

SEQ ID NO: 826 - protein, 7 aa, Homo sapiens
IEAASLR

SEQ ID NO: 827 - protein, 16 aa, Homo sapiens
VGGEFFFDPQPADASR

SEQ ID NO: 828 - protein, 24 aa, Homo sapiens
KAETIQADTPALSLIAETVEDMVK

SEQ ID NO: 829 - protein, 9 aa, Homo sapiens
VPLILNLIR

SEQ ID NO: 830 - protein, 14 aa, Homo sapiens
LKEHHTVEAPGGQK

SEQ ID NO: 831 - protein, 12 aa, Homo sapiens
IVVVDEADTMLK

SEQ ID NO: 832 - protein, 16 aa, Homo sapiens
DVPVDAVATEAATIDR

SEQ ID NO: 833 - protein, 20 aa, Homo sapiens
LVVNFDMPSSMDEYVHQIGR

SEQ ID NO: 834 - protein, 11 aa, Homo sapiens
TAAFLLPVIMR

SEQ ID NO: 835 - protein, 11 aa, Homo sapiens
TPSALILTPTR

SEQ ID NO: 836 - protein, 8 aa, Homo sapiens
VIIATPGR

SEQ ID NO: 837 - protein, 11 aa, Homo sapiens
LDNLFAYWNVK

SEQ ID NO: 838 - protein, 15 aa, Homo sapiens
CIIEAEPLEIIYDAR

SEQ ID NO: 839 - protein, 33 aa, Homo sapiens
NHFSVPLSVYEGDTLLGTASPENEFNIPLGSYR

SEQ ID NO: 840 - protein, 13 aa, Homo sapiens
IFQIQFPLYTAYK

SEQ ID NO: 841 - protein, 12 aa, Homo sapiens
AAAYDLLVEMVK

SEQ ID NO: 842 - protein, 8 aa, Homo sapiens
ILSFNTMR

SEQ ID NO: 843 - protein, 15 aa, Homo sapiens
PATEKDLAEDAPWKK

SEQ ID NO: 844 - protein, 17 aa, Homo sapiens
LLSAIGTSAIMDSDLLK

SEQ ID NO: 845 - protein, 17 aa, Homo sapiens
EVPVPTPAPVEVPVPER

SEQ ID NO: 846 - protein, 12 aa, Homo sapiens
LIVDPALDPALR

SEQ ID NO: 847 - protein, 7 aa, Homo sapiens
PFQNAAK

SEQ ID NO: 848 - protein, 17 aa, Homo sapiens
SGGTTGIEAFAFGSGLR

SEQ ID NO: 849 - protein, 13 aa, Homo sapiens
YVQEGIGSSYLFR

SEQ ID NO: 850 - protein, 12 aa, Homo sapiens
GSFEGTSQNLPK

SEQ ID NO: 851 - protein, 20 aa, Homo sapiens
PGGDFGTAFPEIPVEFLQEK

SEQ ID NO: 852 - protein, 23 aa, Homo sapiens
TPPPELLQTLTAVGGIGQLTAAK

SEQ ID NO: 853 - protein, 20 aa, Homo sapiens
TLFGTNLASQFDGLSSNPSK

SEQ ID NO: 854 - protein, 18 aa, Homo sapiens
IQELSFSPYLISCTVINR

SEQ ID NO: 855 - protein, 19 aa, Homo sapiens
LNDLFGDAALYQSLPTLAR

SEQ ID NO: 856 - protein, 14 aa, Homo sapiens
NQFELMYVTLTELR

SEQ ID NO: 857 - protein, 13 aa, Homo sapiens
NSGVPAFLTPLLR

SEQ ID NO: 858 - protein, 14 aa, Homo sapiens
SDSALLEGAELVNR

SEQ ID NO: 859 - protein, 15 aa, Homo sapiens
VIAAVSHELITSTTR

SEQ ID NO: 860 - protein, 29 aa, Homo sapiens
VPLDTTEYPEEQYVSDILNYIDHGDPQVR

SEQ ID NO: 861 - protein, 18 aa, Homo sapiens
DFTNYFGHLEGCGADLHK

SEQ ID NO: 862 - protein, 13 aa, Homo sapiens
AILESLFSQYSGK

SEQ ID NO: 863 - protein, 19 aa, Homo sapiens
QLQACSLVPGFTDIFSESK

SEQ ID NO: 864 - protein, 11 aa, Homo sapiens
TAQNFLSIFLK

SEQ ID NO: 865 - protein, 11 aa, Homo sapiens
STPENHPETPK

SEQ ID NO: 866 - protein, 20 aa, Homo sapiens
ALLDYLDENTETDPSLVFSR

SEQ ID NO: 867 - protein, 22 aa, Homo sapiens
DNLGSDDPEGDIPVLLQAVLAR

SEQ ID NO: 868 - protein, 11 aa, Homo sapiens
EIETTGQIMHR

SEQ ID NO: 869 - protein, 16 aa, Homo sapiens
FHLQNTLYPQYDPVYR

SEQ ID NO: 870 - protein, 12 aa, Homo sapiens
ILNITDVVAACR

SEQ ID NO: 871 - protein, 13 aa, Homo sapiens
QLILEEIFTSLAR

SEQ ID NO: 872 - protein, 10 aa, Homo sapiens
VLGENAIAVR

SEQ ID NO: 873 - protein, 9 aa, Homo sapiens
VLEYLNDLK

SEQ ID NO: 874 - protein, 15 aa, Homo sapiens
SSCTLFQDIFQHLDK

SEQ ID NO: 875 - protein, 16 aa, Homo sapiens
DILQSCQTSEECELAR

SEQ ID NO: 876 - protein, 11 aa, Homo sapiens
LASLFPALFSR

SEQ ID NO: 877 - protein, 22 aa, Homo sapiens
GSITQGTPALPQTGIPTEALVK

SEQ ID NO: 878 - protein, 15 aa, Homo sapiens
GSQSSDSSSSLSSHR

SEQ ID NO: 879 - protein, 10 aa, Homo sapiens
ISVESIPSLR

SEQ ID NO: 880 - protein, 11 aa, Homo sapiens
NFGLIASYLER

SEQ ID NO: 881 - protein, 15 aa, Homo sapiens
QLSVIPPMMFDAEQR

SEQ ID NO: 882 - protein, 17 aa, Homo sapiens
VSAAVLPLVHPLPEGLR

SEQ ID NO: 883 - protein, 11 aa, Homo sapiens
TNEDHVSQVQK

SEQ ID NO: 884 - protein, 13 aa, Homo sapiens
LASADDIGTLICK

SEQ ID NO: 885 - protein, 12 aa, Homo sapiens
PALDIWPYPSPR

SEQ ID NO: 886 - protein, 13 aa, Homo sapiens
SQQVAAAAHEANK

SEQ ID NO: 887 - protein, 13 aa, Homo sapiens
VGSPATVTFQQNK

SEQ ID NO: 888 - protein, 13 aa, Homo sapiens
AVLQAVSDGQWWK

SEQ ID NO: 889 - protein, 20 aa, Homo sapiens
LHDMVDQLEQILSVSELLEK

SEQ ID NO: 890 - protein, 27 aa, Homo sapiens
KIESEEYEEALSLAHTYGLDTDLVYQR

SEQ ID NO: 891 - protein, 12 aa, Homo sapiens
VTYADTLNHLEK

SEQ ID NO: 892 - protein, 9 aa, Homo sapiens
AEEIEHYAR

SEQ ID NO: 893 - protein, 19 aa, Homo sapiens
AVQEDEVGVPGSNSADLLR

SEQ ID NO: 894 - protein, 16 aa, Homo sapiens
IISALSGGSADLGGPR

SEQ ID NO: 895 - protein, 14 aa, Homo sapiens
LLDFTQAQILQGLR

SEQ ID NO: 896 - protein, 9 aa, Homo sapiens
LLGLAELLR

SEQ ID NO: 897 - protein, 23 aa, Homo sapiens
MVVEPNLQDESEFLYAAQPELLR

SEQ ID NO: 898 - protein, 9 aa, Homo sapiens
NQNIVLSAR

SEQ ID NO: 899 - protein, 16 aa, Homo sapiens
LVEDNPSSLSLVEIYK

SEQ ID NO: 900 - protein, 19 aa, Homo sapiens
VFYTELLNLCEAEDSALTK

SEQ ID NO: 901 - protein, 15 aa, Homo sapiens
LPLTWVLQNQQTFLK

SEQ ID NO: 902 - protein, 27 aa, Homo sapiens
GEGEQLLGPPNPEGDNPESITSVFITK

SEQ ID NO: 903 - protein, 17 aa, Homo sapiens
ATNANPSQLFGTLMILK

SEQ ID NO: 904 - protein, 14 aa, Homo sapiens
FVDFNDPNFGDELK

SEQ ID NO: 905 - protein, 13 aa, Homo sapiens
ACQLPLFSYIVER

SEQ ID NO: 906 - protein, 13 aa, Homo sapiens
EIFQTTVPYMVER

SEQ ID NO: 907 - protein, 10 aa, Homo sapiens
EPYNYFLLLR

SEQ ID NO: 908 - protein, 18 aa, Homo sapiens
GYLAICHPEEQQLSFIER

SEQ ID NO: 909 - protein, 17 aa, Homo sapiens
IAALNALAACNYLPQSR

SEQ ID NO: 910 - protein, 12 aa, Homo sapiens
LGFTPSVTIEQR

SEQ ID NO: 911 - protein, 22 aa, Homo sapiens
TLELCVDNLQPDFLYDHIQPVR

SEQ ID NO: 912 - protein, 9 aa, Homo sapiens
TTLEQLLMR

SEQ ID NO: 913 - protein, 11 aa, Homo sapiens
VNPEREDSETR

SEQ ID NO: 914 - protein, 9 aa, Homo sapiens
KLVQALLEK

SEQ ID NO: 915 - protein, 13 aa, Homo sapiens
EKPEEAGHEAEER

SEQ ID NO: 916 - protein, 25 aa, Homo sapiens
NLMDFDPQTDQPDQLFALLESAANK

SEQ ID NO: 917 - protein, 23 aa, Homo sapiens
LVEGLDQFTGEVISSVSELQSLK

SEQ ID NO: 918 - protein, 12 aa, Homo sapiens
LLEEAQLQDLEK

SEQ ID NO: 919 - protein, 13 aa, Homo sapiens
EAFEELFAQTFSK

SEQ ID NO: 920 - protein, 17 aa, Homo sapiens
GMIDGSTPTITPNPNFR

SEQ ID NO: 921 - protein, 17 aa, Homo sapiens
ILQPNTTDEFVIPLDPR

SEQ ID NO: 922 - protein, 11 aa, Homo sapiens
LLQALHIDGPR

SEQ ID NO: 923 - protein, 16 aa, Homo sapiens
LNALLEPGGVLTISER

SEQ ID NO: 924 - protein, 27 aa, Homo sapiens
LSEEYTFYPDAVSPLQASILQLQHGMR

SEQ ID NO: 925 - protein, 14 aa, Homo sapiens
NTVQGIINFYTALR

SEQ ID NO: 926 - protein, 15 aa, Homo sapiens
SYMEEFPFPYYIILR

SEQ ID NO: 927 - protein, 12 aa, Homo sapiens
TDSQLQGQVLFR

SEQ ID NO: 928 - protein, 13 aa, Homo sapiens
TSLVEYLAAVTGR

SEQ ID NO: 929 - protein, 10 aa, Homo sapiens
WNMQALDMIR

SEQ ID NO: 930 - protein, 10 aa, Homo sapiens
LENYFEELLK

SEQ ID NO: 931 - protein, 18 aa, Homo sapiens
KVPGVTAIELGEETCTFR

SEQ ID NO: 932 - protein, 11 aa, Homo sapiens
AGPGDRDPPTR

SEQ ID NO: 933 - protein, 19 aa, Homo sapiens
EDLMGLAIGTHGANIQQAR

SEQ ID NO: 934 - protein, 13 aa, Homo sapiens
EEGMVPFIFVGTR

SEQ ID NO: 935 - protein, 24 aa, Homo sapiens
ENISNAQALLEYHLSYLQEVEQLR

SEQ ID NO: 936 - protein, 14 aa, Homo sapiens
SYLEFSEDSVQVPR

SEQ ID NO: 937 - protein, 12 aa, Homo sapiens
SSILPFTPPVVK

SEQ ID NO: 938 - protein, 13 aa, Homo sapiens
VETPVLPPVLVPR

SEQ ID NO: 939 - protein, 10 aa, Homo sapiens
EIRPTYAGSK

SEQ ID NO: 940 - protein, 9 aa, Homo sapiens
WGQQEIVAK

SEQ ID NO: 941 - protein, 7 aa, Homo sapiens
FQAAVER

SEQ ID NO: 942 - protein, 17 aa, Homo sapiens
SLMDIPESQSEQDFVLR

SEQ ID NO: 943 - protein, 16 aa, Homo sapiens
FESIYSNYLQSIEDIK

SEQ ID NO: 944 - protein, 18 aa, Homo sapiens
VCTYSAGTDTNPIFLFNK

SEQ ID NO: 945 - protein, 16 aa, Homo sapiens
IQDNNENYQVGLAELR

SEQ ID NO: 946 - protein, 18 aa, Homo sapiens
NFEVNYQELQEEYACLLK

SEQ ID NO: 947 - protein, 12 aa, Homo sapiens
QYQEQLEEEVAK

SEQ ID NO: 948 - protein, 19 aa, Homo sapiens
VTYGTEGLQQLQEFEAAIK

SEQ ID NO: 949 - protein, 15 aa, Homo sapiens
QSQMLEMQVELSSMK

SEQ ID NO: 950 - protein, 15 aa, Homo sapiens
DGIITQLTANLQQAR

SEQ ID NO: 951 - protein, 8 aa, Homo sapiens
FAQIIQEK

SEQ ID NO: 952 - protein, 18 aa, Homo sapiens
IQSIPENSVNVAIDHLSK

SEQ ID NO: 953 - protein, 15 aa, Homo sapiens
LQELEAEQQQIQEER

SEQ ID NO: 954 - protein, 21 aa, Homo sapiens
TELTALGTTDAVGLLNCLEQR

SEQ ID NO: 955 - protein, 22 aa, Homo sapiens
TTTELFHSNEESGFFNELEALR

SEQ ID NO: 956 - protein, 11 aa, Homo sapiens
AGVDTSPDTQK

SEQ ID NO: 957 - protein, 9 aa, Homo sapiens
DILILSSHK

SEQ ID NO: 958 - protein, 16 aa, Homo sapiens
TSSGTKPSVKPTSATK

SEQ ID NO: 959 - protein, 15 aa, Homo sapiens
DVTVLSVAEEQDLLK

SEQ ID NO: 960 - protein, 16 aa, Homo sapiens
SVASDVPEELDFLVPK

SEQ ID NO: 961 - protein, 19 aa, Homo sapiens
AILQLDSPESAQSMYSFLK

SEQ ID NO: 962 - protein, 14 aa, Homo sapiens
ENDPEANIDTIYDR

SEQ ID NO: 963 - protein, 13 aa, Homo sapiens
GVGQANKPDETSK

SEQ ID NO: 964 - protein, 17 aa, Homo sapiens
IPHEPVINSSNVHVGSR

SEQ ID NO: 965 - protein, 14 aa, Homo sapiens
TALLPSDSVFAEER

SEQ ID NO: 966 - protein, 10 aa, Homo sapiens
LPTTGMTITK

SEQ ID NO: 967 - protein, 29 aa, Homo sapiens
VTSVGNPTIKPHSVPSHTLPSHPVTPSSK

SEQ ID NO: 968 - protein, 20 aa, Homo sapiens
ILVSCNNQQDLQEWVEHLQK

SEQ ID NO: 969 - protein, 17 aa, Homo sapiens
SLVDTVYALKDEVQELR

SEQ ID NO: 970 - protein, 8 aa, Homo sapiens
GDVIHVTR

SEQ ID NO: 971 - protein, 10 aa, Homo sapiens
NLSAQCQEVR

SEQ ID NO: 972 - protein, 13 aa, Homo sapiens
VGGCFLNLMPQMK

SEQ ID NO: 973 - protein, 9 aa, Homo sapiens
AVLCCMQLK

SEQ ID NO: 974 - protein, 15 aa, Homo sapiens
DYLHPYVEAGNPQAR

SEQ ID NO: 975 - protein, 11 aa, Homo sapiens
ALAELFGLLVK

SEQ ID NO: 976 - protein, 12 aa, Homo sapiens
VSDGGSSSTDFK

SEQ ID NO: 977 - protein, 10 aa, Homo sapiens
FLQFVTGTSK

SEQ ID NO: 978 - protein, 15 aa, Homo sapiens
GNDTPLALESTNTEK

SEQ ID NO: 979 - protein, 13 aa, Homo sapiens
LLSLISIALPENK

SEQ ID NO: 980 - protein, 18 aa, Homo sapiens
SISVNQWGSQLGLSVLSK

SEQ ID NO: 981 - protein, 14 aa, Homo sapiens
IPIPLMDYILNVMK

SEQ ID NO: 982 - protein, 11 aa, Homo sapiens
HVLDTLIQLAK

SEQ ID NO: 983 - protein, 17 aa, Homo sapiens
TTPLKPSPLPVIPDTIK

SEQ ID NO: 984 - protein, 21 aa, Homo sapiens
EVIYDMLNALAAYHAPEEADK

SEQ ID NO: 985 - protein, 15 aa, Homo sapiens
VCNDEQLLLELQQIK

SEQ ID NO: 986 - protein, 21 aa, Homo sapiens
LPSAHTCFNQLDLPAYESFEK

SEQ ID NO: 987 - protein, 12 aa, Homo sapiens
SSESELCIETPK

SEQ ID NO: 988 - protein, 10 aa, Homo sapiens
YICQKPSIQK

SEQ ID NO: 989 - protein, 12 aa, Homo sapiens
IVNQPSSLFGSK

SEQ ID NO: 990 - protein, 22 aa, Homo sapiens
FVESILSNNTTDDHCQEFVNQK

SEQ ID NO: 991 - protein, 10 aa, Homo sapiens
VCDLIMTAIK

SEQ ID NO: 992 - protein, 12 aa, Homo sapiens
HVMDGSLPTSLK

SEQ ID NO: 993 - protein, 7 aa, Homo sapiens
FLVVTQK

SEQ ID NO: 994 - protein, 10 aa, Homo sapiens
ALAMAESTEK

SEQ ID NO: 995 - protein, 14 aa, Homo sapiens
ISESPSEIMESLTK

SEQ ID NO: 996 - protein, 20 aa, Homo sapiens
ACVSMLGVPVDPDTLHATLR

SEQ ID NO: 997 - protein, 11 aa, Homo sapiens
ADGTATAPPPR

SEQ ID NO: 998 - protein, 19 aa, Homo sapiens
AGSSTPGDAPPAVAEVQGR

SEQ ID NO: 999 - protein, 15 aa, Homo sapiens
AIAMSLGQDIPMDQR

SEQ ID NO: 1000 - protein, 12 aa, Homo sapiens
DLSMSEEDQMMR

SEQ ID NO: 1001 - protein, 12 aa, Homo sapiens
DSAVAISGADSR

SEQ ID NO: 1002 - protein, 11 aa, Homo sapiens
EMFNPMYALFR

SEQ ID NO: 1003 - protein, 18 aa, Homo sapiens
EVLGSLPNVFSALCLNAR

SEQ ID NO: 1004 - protein, 14 aa, Homo sapiens
FLGDEQDQITFVTR

SEQ ID NO: 1005 - protein, 13 aa, Homo sapiens
GLQSFVQCQPFER

SEQ ID NO: 1006 - protein, 14 aa, Homo sapiens
GLSWQPPPYTPTPR

SEQ ID NO: 1007 - protein, 14 aa, Homo sapiens
GSGTASDDEFENLR

SEQ ID NO: 1008 - protein, 17 aa, Homo sapiens
HADHSSLTLGSGSSTTR

SEQ ID NO: 1009 - protein, 10 aa, Homo sapiens
HIIEDPCTLR

SEQ ID NO: 1010 - protein, 8 aa, Homo sapiens
LCVGSPVR

SEQ ID NO: 1011 - protein, 9 aa, Homo sapiens
LEHEVDLCR

SEQ ID NO: 1012 - protein, 17 aa, Homo sapiens
LGSSGLGSASSIQAAVR

SEQ ID NO: 1013 - protein, 8 aa, Homo sapiens
LLECYFTR

SEQ ID NO: 1014 - protein, 10 aa, Homo sapiens
LLEEICNLGR

SEQ ID NO: 1015 - protein, 22 aa, Homo sapiens
LLGPSAAADILQLSSSLPLQSR

SEQ ID NO: 1016 - protein, 15 aa, Homo sapiens
LPGGVQNFPQFSALR

SEQ ID NO: 1017 - protein, 22 aa, Homo sapiens
LSSIIDCTGTASYHGFLPVLVR

SEQ ID NO: 1018 - protein, 14 aa, Homo sapiens
QLEAEADAIIQMVR

SEQ ID NO: 1019 - protein, 9 aa, Homo sapiens
RPVMLTLLR

SEQ ID NO: 1020 - protein, 22 aa, Homo sapiens
SAATSGAGSTTSGVVSGSLGSR

SEQ ID NO: 1021 - protein, 16 aa, Homo sapiens
SHHAASTTTAPTPAAR

SEQ ID NO: 1022 - protein, 8 aa, Homo sapiens
SLLSILQR

SEQ ID NO: 1023 - protein, 7 aa, Homo sapiens
SPAFTSR

SEQ ID NO: 1024 - protein, 21 aa, Homo sapiens
SSDPLGDTASNLGSAVDELMR

SEQ ID NO: 1025 - protein, 8 aa, Homo sapiens
TNIFQIQR

SEQ ID NO: 1026 - protein, 7 aa, Homo sapiens
VGQSEIR

SEQ ID NO: 1027 - protein, 12 aa, Homo sapiens
VLLSPDYLPAMR

SEQ ID NO: 1028 - protein, 11 aa, Homo sapiens
GVVEEWLSEFK

SEQ ID NO: 1029 - protein, 8 aa, Homo sapiens
ALDDIIYR

SEQ ID NO: 1030 - protein, 22 aa, Homo sapiens
VIQEPQSELLEPVCHQLFEFYR

SEQ ID NO: 1031 - protein, 11 aa, Homo sapiens
ISSEPLKDEFK

SEQ ID NO: 1032 - protein, 7 aa, Homo sapiens
LFDPQLK

SEQ ID NO: 1033 - protein, 8 aa, Homo sapiens
KGESWFFR

SEQ ID NO: 1034 - protein, 19 aa, Homo sapiens
ADSGPTQPPLSLSPAPETK

SEQ ID NO: 1035 - protein, 9 aa, Homo sapiens
FGPGGQLIK

SEQ ID NO: 1036 - protein, 22 aa, Homo sapiens
EKPEEESLAAPTWLVHLQQVER

SEQ ID NO: 1037 - protein, 26 aa, Homo sapiens
PQELVGTFIQQEVGKPEDEASGSFFK

SEQ ID NO: 1038 - protein, 14 aa, Homo sapiens
GGIGASENLENPPK

SEQ ID NO: 1039 - protein, 9 aa, Homo sapiens
LFDPQLKEK

SEQ ID NO: 1040 - protein, 12 aa, Homo sapiens
GLANPEPAPEPK

SEQ ID NO: 1041 - protein, 18 aa, Homo sapiens
DSSQGPCEPLPGPLTQPR

SEQ ID NO: 1042 - protein, 21 aa, Homo sapiens
FANSLPINDPLQTVYQLMSGR

SEQ ID NO: 1043 - protein, 11 aa, Homo sapiens
IVNHWASPELR

SEQ ID NO: 1044 - protein, 15 aa, Homo sapiens
NEHRPASALVNPLAR

SEQ ID NO: 1045 - protein, 11 aa, Homo sapiens
NPSSAAPVQSR

SEQ ID NO: 1046 - protein, 19 aa, Homo sapiens
PQPPVVQPPEEAMSGQQSR

SEQ ID NO: 1047 - protein, 16 aa, Homo sapiens
QNGTVVGTDIAELLLR

SEQ ID NO: 1048 - protein, 10 aa, Homo sapiens
SVFWASSPYR

SEQ ID NO: 1049 - protein, 12 aa, Homo sapiens
TMATMGDTLASR

SEQ ID NO: 1050 - protein, 12 aa, Homo sapiens
YVDVLNPSGTQR

SEQ ID NO: 1051 - protein, 13 aa, Homo sapiens
MSAPQHCPEDISK

SEQ ID NO: 1052 - protein, 31 aa, Homo sapiens
SALGSSALSDMISISEKPLAEQDWYHGAIPR

SEQ ID NO: 1053 - protein, 8 aa, Homo sapiens
HSIAGIIR

SEQ ID NO: 1054 - protein, 8 aa, Homo sapiens
LIGVCTQR

SEQ ID NO: 1055 - protein, 11 aa, Homo sapiens
WTAPEALNYGR

SEQ ID NO: 1056 - protein, 15 aa, Homo sapiens
TYGGDTGSPEISFTK

SEQ ID NO: 1057 - protein, 7 aa, Homo sapiens
IFNNVSK

SEQ ID NO: 1058 - protein, 12 aa, Homo sapiens
IIGIPSPSSLFK

SEQ ID NO: 1059 - protein, 11 aa, Homo sapiens
MSNITIDPDVK

SEQ ID NO: 1060 - protein, 17 aa, Homo sapiens
SNITIDPDVKPGEYVIK

SEQ ID NO: 1061 - protein, 14 aa, Homo sapiens
QPLTATTLSDVLSR

SEQ ID NO: 1062 - protein, 9 aa, Homo sapiens
TDLIELLAR

SEQ ID NO: 1063 - protein, 12 aa, Homo sapiens
VIGMSVYYPQVR

SEQ ID NO: 1064 - protein, 10 aa, Homo sapiens
LEKAIAFADR

SEQ ID NO: 1065 - protein, 17 aa, Homo sapiens
AVDTDGVEPMESVLEDR

SEQ ID NO: 1066 - protein, 11 aa, Homo sapiens
ITAAVIEHLER

SEQ ID NO: 1067 - protein, 9 aa, Homo sapiens
LALVDFGSR

SEQ ID NO: 1068 - protein, 18 aa, Homo sapiens
SHHGEHERPEFIAYPHLR

SEQ ID NO: 1069 - protein, 26 aa, Homo sapiens
LCLTLGIPQATDPDKTYELTTDNMLK

SEQ ID NO: 1070 - protein, 7 aa, Homo sapiens
YLWQHLK

SEQ ID NO: 1071 - protein, 11 aa, Homo sapiens
DYIQEYLTLLK

SEQ ID NO: 1072 - protein, 12 aa, Homo sapiens
SIVEELCAWVEK

SEQ ID NO: 1073 - protein, 22 aa, Homo sapiens
DLQQYVSVVVLDEVGLAEDSPK

SEQ ID NO: 1074 - protein, 9 aa, Homo sapiens
HVVPLPDGK

SEQ ID NO: 1075 - protein, 18 aa, Homo sapiens
VMEELPLMLLSEFSLVDK

SEQ ID NO: 1076 - protein, 13 aa, Homo sapiens
EYHHLHQAVHAAK

SEQ ID NO: 1077 - protein, 10 aa, Homo sapiens
EAENVAFANK

SEQ ID NO: 1078 - protein, 13 aa, Homo sapiens
ITVEYLQHIVEQK

SEQ ID NO: 1079 - protein, 20 aa, Homo sapiens
DETGNNSVQTVFQGTLAATK

SEQ ID NO: 1080 - protein, 19 aa, Homo sapiens
FLAQLHGEPQQELLQCYLK

SEQ ID NO: 1081 - protein, 11 aa, Homo sapiens
LIAVADSVLTK

SEQ ID NO: 1082 - protein, 14 aa, Homo sapiens
NMLTSSGASFTYVK

SEQ ID NO: 1083 - protein, 9 aa, Homo sapiens
GFLQQHILK

SEQ ID NO: 1084 - protein, 24 aa, Homo sapiens
VHALPPSLIPLVWDFGQLSDVAEK

SEQ ID NO: 1085 - protein, 12 aa, Homo sapiens
LDPSVDFSAFMK

SEQ ID NO: 1086 - protein, 17 aa, Homo sapiens
VPELQGLVTEHVFLLDK

SEQ ID NO: 1087 - protein, 9 aa, Homo sapiens
GIYVIQAPK

SEQ ID NO: 1088 - protein, 34 aa, Homo sapiens
AEDGHEEAMETEASTSGEVAEVAEEAMETESSEK

SEQ ID NO: 1089 - protein, 18 aa, Homo sapiens
SHNASLHPTPEQCEAVSK

SEQ ID NO: 1090 - protein, 12 aa, Homo sapiens
VPQFSFLDIFPK

SEQ ID NO: 1091 - protein, 15 aa, Homo sapiens
VGFVGISNWALDPAK

SEQ ID NO: 1092 - protein, 20 aa, Homo sapiens
TLHPLLEDGCIEDDPAPHKK

SEQ ID NO: 1093 - protein, 13 aa, Homo sapiens
GSPNETELIESAK

SEQ ID NO: 1094 - protein, 15 aa, Homo sapiens
EIAAVISPELEHLDK

SEQ ID NO: 1095 - protein, 16 aa, Homo sapiens
AADFLSEPEGGPEMAK

SEQ ID NO: 1096 - protein, 15 aa, Homo sapiens
VLGALLPFLDAQYQK

SEQ ID NO: 1097 - protein, 9 aa, Homo sapiens
HLLTLADVK

SEQ ID NO: 1098 - protein, 21 aa, Homo sapiens
AASEAPEEEVSLPWVHLAYQR

SEQ ID NO: 1099 - protein, 12 aa, Homo sapiens
AQDLFLDGVPLR

SEQ ID NO: 1100 - protein, 11 aa, Homo sapiens
ASVGCGSEAAR

SEQ ID NO: 1101 - protein, 18 aa, Homo sapiens
DCEASLFCNPSFIGDTLR

SEQ ID NO: 1102 - protein, 18 aa, Homo sapiens
DLTPLILSNCQYQVEEGR

SEQ ID NO: 1103 - protein, 10 aa, Homo sapiens
DSHIFQLFWR

SEQ ID NO: 1104 - protein, 15 aa, Homo sapiens
EACNQDALQEAGTFR

SEQ ID NO: 1105 - protein, 10 aa, Homo sapiens
EEDLAPFSLR

SEQ ID NO: 1106 - protein, 14 aa, Homo sapiens
EGGDVTELLAALCR

SEQ ID NO: 1107 - protein, 14 aa, Homo sapiens
EQMLDTSSLLQFMR

SEQ ID NO: 1108 - protein, 17 aa, Homo sapiens
ETSELGGSDVSILDTTR

SEQ ID NO: 1109 - protein, 11 aa, Homo sapiens
EVIDMELSALR

SEQ ID NO: 1110 - protein, 14 aa, Homo sapiens
FATSLVDNSVPLLR

SEQ ID NO: 1111 - protein, 7 aa, Homo sapiens
FLNYQLR

SEQ ID NO: 1112 - protein, 10 aa, Homo sapiens
FLPEILALQR

SEQ ID NO: 1113 - protein, 7 aa, Homo sapiens
FLSDLRR

SEQ ID NO: 1114 - protein, 10 aa, Homo sapiens
FSEVFCSVQR

SEQ ID NO: 1115 - protein, 12 aa, Homo sapiens
FVDIFQQTPLGR

SEQ ID NO: 1116 - protein, 12 aa, Homo sapiens
GICSSDILVQDR

SEQ ID NO: 1117 - protein, 18 aa, Homo sapiens
GREPANEASVEYLQEVAR

SEQ ID NO: 1118 - protein, 12 aa, Homo sapiens
HAIFTEITTFSR

SEQ ID NO: 1119 - protein, 11 aa, Homo sapiens
HYLDINTVLEK

SEQ ID NO: 1120 - protein, 18 aa, Homo sapiens
IFSTALFVEHVLLGTESR

SEQ ID NO: 1121 - protein, 8 aa, Homo sapiens
IIMEQSMR

SEQ ID NO: 1122 - protein, 15 aa, Homo sapiens
IIYGDPVTFLPHLPR

SEQ ID NO: 1123 - protein, 7 aa, Homo sapiens
ILAIEMR

SEQ ID NO: 1124 - protein, 16 aa, Homo sapiens
ILTIYPQVLHSLMEAR

SEQ ID NO: 1125 - protein, 22 aa, Homo sapiens
ISPDTVLHLILPESPGSHEESR

SEQ ID NO: 1126 - protein, 9 aa, Homo sapiens
LESAGLGYR

SEQ ID NO: 1127 - protein, 10 aa, Homo sapiens
LIDPQVDESR

SEQ ID NO: 1128 - protein, 8 aa, Homo sapiens
LLLDEITR

SEQ ID NO: 1129 - protein, 11 aa, Homo sapiens
LLQEQHQLSSR

SEQ ID NO: 1130 - protein, 17 aa, Homo sapiens
LLTSHDCEILESEVTGR

SEQ ID NO: 1131 - protein, 9 aa, Homo sapiens
LYIQQIVQR

SEQ ID NO: 1132 - protein, 9 aa, Homo sapiens
LYLVNLCQR

SEQ ID NO: 1133 - protein, 12 aa, Homo sapiens
NDELNHLEEEGR

SEQ ID NO: 1134 - protein, 10 aa, Homo sapiens
NQFLDIWQLR

SEQ ID NO: 1135 - protein, 12 aa, Homo sapiens
QHLLSIDEPLFR

SEQ ID NO: 1136 - protein, 23 aa, Homo sapiens
QVHLVSFQCSPHSTPQGIISTFR

SEQ ID NO: 1137 - protein, 11 aa, Homo sapiens
SCVQSAVGMLR

SEQ ID NO: 1138 - protein, 19 aa, Homo sapiens
SDTEPGMDLWEFCSETFQR

SEQ ID NO: 1139 - protein, 14 aa, Homo sapiens
SILLNCATPDAVVR

SEQ ID NO: 1140 - protein, 12 aa, Homo sapiens
SSLTLATAINQR

SEQ ID NO: 1141 - protein, 18 aa, Homo sapiens
TIVADAMQGPAAYSDLFR

SEQ ID NO: 1142 - protein, 16 aa, Homo sapiens
TPQSQQSAYFLLTLFR

SEQ ID NO: 1143 - protein, 21 aa, Homo sapiens
VFVTPQAPLEAIQAYLAGHYR

SEQ ID NO: 1144 - protein, 13 aa, Homo sapiens
VHGGTTADMIYSR

SEQ ID NO: 1145 - protein, 14 aa, Homo sapiens
VITEVLCASQGFMR

SEQ ID NO: 1146 - protein, 12 aa, Homo sapiens
VPGGEQEDAESR

SEQ ID NO: 1147 - protein, 18 aa, Homo sapiens
VQGAVTPLLASMISFIDR

SEQ ID NO: 1148 - protein, 9 aa, Homo sapiens
VSMEETADR

SEQ ID NO: 1149 - protein, 12 aa, Homo sapiens
WDSNICELHYTR

SEQ ID NO: 1150 - protein, 10 aa, Homo sapiens
YVDLGLGTHR

SEQ ID NO: 1151 - protein, 12 aa, Homo sapiens
LYQYMLNAGLAK

SEQ ID NO: 1152 - protein, 19 aa, Homo sapiens
RDPVALEDVYPIHMILENK

SEQ ID NO: 1153 - protein, 10 aa, Homo sapiens
LIESLFTIQK

SEQ ID NO: 1154 - protein, 17 aa, Homo sapiens
ALPFVPMSYQLSQTYYR

SEQ ID NO: 1155 - protein, 12 aa, Homo sapiens
DMLTQTYDLIER

SEQ ID NO: 1156 - protein, 15 aa, Homo sapiens
FPSTICTESFQFLDR

SEQ ID NO: 1157 - protein, 11 aa, Homo sapiens
GYYSPGIVSTR

SEQ ID NO: 1158 - protein, 11 aa, Homo sapiens
LKDREDADIQR

SEQ ID NO: 1159 - protein, 11 aa, Homo sapiens
NLIIEAVTNLR

SEQ ID NO: 1160 - protein, 9 aa, Homo sapiens
NPQAYLNYK

SEQ ID NO: 1161 - protein, 16 aa, Homo sapiens
NSNLEIPDTLQELFAR

SEQ ID NO: 1162 - protein, 24 aa, Homo sapiens
TFADCIQALLEQHQVLEVGGNTAR

SEQ ID NO: 1163 - protein, 12 aa, Homo sapiens
YHDEADQSALQR

SEQ ID NO: 1164 - protein, 11 aa, Homo sapiens
YIFSVVENLQR

SEQ ID NO: 1165 - protein, 13 aa, Homo sapiens
SSPVNRPSSATNK

SEQ ID NO: 1166 - protein, 18 aa, Homo sapiens
HQPASASSTAASPAHPAK

SEQ ID NO: 1167 - protein, 15 aa, Homo sapiens
DIADVTAVAEAILPK

SEQ ID NO: 1168 - protein, 16 aa, Homo sapiens
VAQPETPVTLQFQGSK

SEQ ID NO: 1169 - protein, 16 aa, Homo sapiens
TAAPTTASAAPQGPLR

SEQ ID NO: 1170 - protein, 9 aa, Homo sapiens
DDYANLHSK

SEQ ID NO: 1171 - protein, 10 aa, Homo sapiens
LSQAFNHWLK

SEQ ID NO: 1172 - protein, 21 aa, Homo sapiens
EDVETGLDPLSLLATECTGGK

SEQ ID NO: 1173 - protein, 14 aa, Homo sapiens
HKKEEEDEELDLNK

SEQ ID NO: 1174 - protein, 17 aa, Homo sapiens
TVTIPTQPYQDIVTALK

SEQ ID NO: 1175 - protein, 12 aa, Homo sapiens
LLELEQDASSAK

SEQ ID NO: 1176 - protein, 20 aa, Homo sapiens
TGEQDGLIGTALNCVLQVPK

SEQ ID NO: 1177 - protein, 13 aa, Homo sapiens
IVEDDASISSCNK

SEQ ID NO: 1178 - protein, 16 aa, Homo sapiens
EYLPEGDFSIMTEMLK

SEQ ID NO: 1179 - protein, 11 aa, Homo sapiens
LLGGLDHIVDK

SEQ ID NO: 1180 - protein, 14 aa, Homo sapiens
ALQHCEELIQQYNR

SEQ ID NO: 1181 - protein, 18 aa, Homo sapiens
SMDEFTASTPADLGEAGR

SEQ ID NO: 1182 - protein, 14 aa, Homo sapiens
TGLFEWDNDFEDIR

SEQ ID NO: 1183 - protein, 11 aa, Homo sapiens
VALDTLAALLK

SEQ ID NO: 1184 - protein, 11 aa, Homo sapiens
TLQQQPGDQNR

SEQ ID NO: 1185 - protein, 19 aa, Homo sapiens
SLTTLGLVISALADQSAGK

SEQ ID NO: 1186 - protein, 11 aa, Homo sapiens
ITLTHTLYDVK

SEQ ID NO: 1187 - protein, 15 aa, Homo sapiens
NFDFEGSLSPVIAPK

SEQ ID NO: 1188 - protein, 10 aa, Homo sapiens
VQYVVDHAMK

SEQ ID NO: 1189 - protein, 17 aa, Homo sapiens
DYIASLPFQVANVWPTK

SEQ ID NO: 1190 - protein, 10 aa, Homo sapiens
DLQEFVPFGR

SEQ ID NO: 1191 - protein, 17 aa, Homo sapiens
EDPMGWQSLLAQTVANR

SEQ ID NO: 1192 - protein, 11 aa, Homo sapiens
HSTSVSSLAER

SEQ ID NO: 1193 - protein, 9 aa, Homo sapiens
LQVEQEENR

SEQ ID NO: 1194 - protein, 11 aa, Homo sapiens
WVDSNVPQIIR

SEQ ID NO: 1195 - protein, 13 aa, Homo sapiens
LAGELQLLLEEIK

SEQ ID NO: 1196 - protein, 16 aa, Homo sapiens
NASLQDTLEVLQSSYK

SEQ ID NO: 1197 - protein, 13 aa, Homo sapiens
GVEELESLCEVYR

SEQ ID NO: 1198 - protein, 11 aa, Homo sapiens
LQLQGLDLSSR

SEQ ID NO: 1199 - protein, 12 aa, Homo sapiens
LSSTQEEVHQLR

SEQ ID NO: 1200 - protein, 11 aa, Homo sapiens
TAVEMLQNQLK

SEQ ID NO: 1201 - protein, 12 aa, Homo sapiens
NSSPGEASLLEK

SEQ ID NO: 1202 - protein, 17 aa, Homo sapiens
VNLTLADLEQLAGSDLK

SEQ ID NO: 1203 - protein, 21 aa, Homo sapiens
LYVGGLSQDISEADLQNQFSR

SEQ ID NO: 1204 - protein, 24 aa, Homo sapiens
GSPDEENEEIEDLSDAAFAALHAK

SEQ ID NO: 1205 - protein, 13 aa, Homo sapiens
LLTEADLIALMEK

SEQ ID NO: 1206 - protein, 13 aa, Homo sapiens
MDNSQHPQPADSR

SEQ ID NO: 1207 - protein, 17 aa, Homo sapiens
AGEIITVLDDSDPNWWK

SEQ ID NO: 1208 - protein, 11 aa, Homo sapiens
QGQQQAGGDGK

SEQ ID NO: 1209 - protein, 9 aa, Homo sapiens
TLYHSVHEK

SEQ ID NO: 1210 - protein, 14 aa, Homo sapiens
EAVLIDPVLETAPR

SEQ ID NO: 1211 - protein, 10 aa, Homo sapiens
GGSGAPILLR

SEQ ID NO: 1212 - protein, 21 aa, Homo sapiens
LLYAVNTHCHADHITGSGLLR

SEQ ID NO: 1213 - protein, 17 aa, Homo sapiens
LSGAQADLHIEDGDSIR

SEQ ID NO: 1214 - protein, 17 aa, Homo sapiens
QMFEPVSCTFTYLLGDR

SEQ ID NO: 1215 - protein, 9 aa, Homo sapiens
TDFQQGCAK

SEQ ID NO: 1216 - protein, 12 aa, Homo sapiens
TLHTDILFGLIK

SEQ ID NO: 1217 - protein, 11 aa, Homo sapiens
TSLGNVVLLLK

SEQ ID NO: 1218 - protein, 12 aa, Homo sapiens
AITAGYFYHTAR

SEQ ID NO: 1219 - protein, 17 aa, Homo sapiens
AVDLVEEESGAPGEEQR

SEQ ID NO: 1220 - protein, 18 aa, Homo sapiens
ELLVLPIYANLPSDMQAR

SEQ ID NO: 1221 - protein, 9 aa, Homo sapiens
EQLEGLLER

SEQ ID NO: 1222 - protein, 12 aa, Homo sapiens
FSTFFDDAPVFR

SEQ ID NO: 1223 - protein, 14 aa, Homo sapiens
LRDTDTLDLSGPAR

SEQ ID NO: 1224 - protein, 19 aa, Homo sapiens
QQQTVFIHPNSSLFEQQPR

SEQ ID NO: 1225 - protein, 15 aa, Homo sapiens
WVQDELHSVLGLSER

SEQ ID NO: 1226 - protein, 12 aa, Homo sapiens
LVDLPLGLPFYK

SEQ ID NO: 1227 - protein, 12 aa, Homo sapiens
IDPLALVQAIER

SEQ ID NO: 1228 - protein, 17 aa, Homo sapiens
LLDTNPEINQSDSQDSR

SEQ ID NO: 1229 - protein, 12 aa, Homo sapiens
FAGTGEQKEEQR

SEQ ID NO: 1230 - protein, 11 aa, Homo sapiens
NLFEMAINLAK

SEQ ID NO: 1231 - protein, 15 aa, Homo sapiens
ANSEEFIPIFANNPR

SEQ ID NO: 1232 - protein, 15 aa, Homo sapiens
CSNDSFSVIADYFGR

SEQ ID NO: 1233 - protein, 7 aa, Homo sapiens
DLLMHSR

SEQ ID NO: 1234 - protein, 12 aa, Homo sapiens
GNHDGAVQQYIR

SEQ ID NO: 1235 - protein, 11 aa, Homo sapiens
GNYPVTGLAFR

SEQ ID NO: 1236 - protein, 7 aa, Homo sapiens
IQLEDIK

SEQ ID NO: 1237 - protein, 11 aa, Homo sapiens
QSQQIAQDELR

SEQ ID NO: 1238 - protein, 13 aa, Homo sapiens
VMQVLDADAIVVK

SEQ ID NO: 1239 - protein, 15 aa, Homo sapiens
SVITYVSSLYDAFPK

SEQ ID NO: 1240 - protein, 21 aa, Homo sapiens
EMFSQFAEFDDELDSMAPVGR

SEQ ID NO: 1241 - protein, 16 aa, Homo sapiens
FMETTDPSTASSLQAK

SEQ ID NO: 1242 - protein, 16 aa, Homo sapiens
MQSSADLIIQEFMDLR

SEQ ID NO: 1243 - protein, 25 aa, Homo sapiens
FFGPGEFDPSVDVYAMKSHESSPKK

SEQ ID NO: 1244 - protein, 15 aa, Homo sapiens
TVSSEDVAEMHNILK

SEQ ID NO: 1245 - protein, 17 aa, Homo sapiens
HGAGAEISTVNPEQYSK

SEQ ID NO: 1246 - protein, 15 aa, Homo sapiens
DAANILVMGVENSAK

SEQ ID NO: 1247 - protein, 18 aa, Homo sapiens
SIPVNEKDTLTYFIYSVK

SEQ ID NO: 1248 - protein, 9 aa, Homo sapiens
VPLAFAMVK

SEQ ID NO: 1249 - protein, 7 aa, Homo sapiens
HLFLLLK

SEQ ID NO: 1250 - protein, 10 aa, Homo sapiens
LGTVLPVIEK

SEQ ID NO: 1251 - protein, 19 aa, Homo sapiens
CQSFNQLVYHQNEIVQSLK

SEQ ID NO: 1252 - protein, 13 aa, Homo sapiens
VEGVGQLLFEMCK

SEQ ID NO: 1253 - protein, 14 aa, Homo sapiens
GPLSQEALMELFPK

SEQ ID NO: 1254 - protein, 15 aa, Homo sapiens
YPLVFSPQMVGFYIK

SEQ ID NO: 1255 - protein, 17 aa, Homo sapiens
LLCTVFETLSDFESGLK

SEQ ID NO: 1256 - protein, 21 aa, Homo sapiens
LGPVTETETQLPWMLIGETLK

SEQ ID NO: 1257 - protein, 16 aa, Homo sapiens
DMSSIYSMYSTLLAHK

SEQ ID NO: 1258 - protein, 10 aa, Homo sapiens
PATLLWLIQK

SEQ ID NO: 1259 - protein, 12 aa, Homo sapiens
FLDQSLGEQVVK

SEQ ID NO: 1260 - protein, 13 aa, Homo sapiens
ALEFVTNPDIAAK

SEQ ID NO: 1261 - protein, 20 aa, Homo sapiens
GNIAEDTEVDILVTVQNLLK

SEQ ID NO: 1262 - protein, 12 aa, Homo sapiens
FETFQTITSYIK

SEQ ID NO: 1263 - protein, 10 aa, Homo sapiens
ITLDCIMTYK

SEQ ID NO: 1264 - protein, 17 aa, Homo sapiens
HENITTAATEIIGAICK

SEQ ID NO: 1265 - protein, 11 aa, Homo sapiens
NLSQEIIELLK

SEQ ID NO: 1266 - protein, 18 aa, Homo sapiens
TASYEEEVETYFFEGLLK

SEQ ID NO: 1267 - protein, 20 aa, Homo sapiens
DLVQLTHYHDPEMDFFENMK

SEQ ID NO: 1268 - protein, 14 aa, Homo sapiens
LGSESQYSPTPLLK

SEQ ID NO: 1269 - protein, 9 aa, Homo sapiens
LAALNVTEK

SEQ ID NO: 1270 - protein, 9 aa, Homo sapiens
FLASDLDQK

SEQ ID NO: 1271 - protein, 9 aa, Homo sapiens
ADLFPILMR

SEQ ID NO: 1272 - protein, 20 aa, Homo sapiens
FINNEYYPADLQVAPTQDLR

SEQ ID NO: 1273 - protein, 19 aa, Homo sapiens
HDVVQTAVPDGPLQEVPLR

SEQ ID NO: 1274 - protein, 10 aa, Homo sapiens
HLDDINFDVR

SEQ ID NO: 1275 - protein, 21 aa, Homo sapiens
ILNHFDVQLPESMEDDGLSER

SEQ ID NO: 1276 - protein, 20 aa, Homo sapiens
LRPNLEFMLAQLNYEHETGR

SEQ ID NO: 1277 - protein, 12 aa, Homo sapiens
NFAAESFTFLMR

SEQ ID NO: 1278 - protein, 13 aa, Homo sapiens
NIQGTITGDILPR

SEQ ID NO: 1279 - protein, 8 aa, Homo sapiens
QSVFAILR

SEQ ID NO: 1280 - protein, 21 aa, Homo sapiens
ISLLPNDEDSLPPLLVASGEK

SEQ ID NO: 1281 - protein, 20 aa, Homo sapiens
EEGLEVGPPEVLDTLSQLLK

SEQ ID NO: 1282 - protein, 13 aa, Homo sapiens
TPIESLFIEATEK

SEQ ID NO: 1283 - protein, 12 aa, Homo sapiens
ELIGMDPVAVFR

SEQ ID NO: 1284 - protein, 17 aa, Homo sapiens
ELPEPLMTFAQYGDFLR

SEQ ID NO: 1285 - protein, 14 aa, Homo sapiens
LILPYSLSEAITAR

SEQ ID NO: 1286 - protein, 14 aa, Homo sapiens
ELLASTILTHVPVK

SEQ ID NO: 1287 - protein, 18 aa, Homo sapiens
FGEVISYQQLAALAGNPK

SEQ ID NO: 1288 - protein, 18 aa, Homo sapiens
VVCSSGAVGNYSGGLAVK

SEQ ID NO: 1289 - protein, 10 aa, Homo sapiens
EWLLAHEGHR

SEQ ID NO: 1290 - protein, 13 aa, Homo sapiens
GAGATSGSPPAGR

SEQ ID NO: 1291 - protein, 14 aa, Homo sapiens
GAGATSGSPPAGRN

SEQ ID NO: 1292 - protein, 11 aa, Homo sapiens
LVTDEDVFPTK

SEQ ID NO: 1293 - protein, 18 aa, Homo sapiens
LLPLSVTPEAFSGTVIEK

SEQ ID NO: 1294 - protein, 24 aa, Homo sapiens
EFVSPSLTPPPAIAHPALPTIPER

SEQ ID NO: 1295 - protein, 14 aa, Homo sapiens
FELYQIFSTPDYGK

SEQ ID NO: 1296 - protein, 8 aa, Homo sapiens
PAGFVDNK

SEQ ID NO: 1297 - protein, 20 aa, Homo sapiens
ALGLVTPAGVLLAGPPGCGK

SEQ ID NO: 1298 - protein, 15 aa, Homo sapiens
LGTEPTSETQDELQR

SEQ ID NO: 1299 - protein, 18 aa, Homo sapiens
VLVIGATNRPDSLDPALR

SEQ ID NO: 1300 - protein, 11 aa, Homo sapiens
QFLGYVPIMVK

SEQ ID NO: 1301 - protein, 15 aa, Homo sapiens
DALLAHGTSFLLHDR

SEQ ID NO: 1302 - protein, 10 aa, Homo sapiens
EANVYPAECR

SEQ ID NO: 1303 - protein, 12 aa, Homo sapiens
TSVSMNTDNLMR

SEQ ID NO: 1304 - protein, 21 aa, Homo sapiens
AQEVEAELLESHQEETNQLLK

SEQ ID NO: 1305 - protein, 15 aa, Homo sapiens
TLQEKELTCQILEQK

SEQ ID NO: 1306 - protein, 9 aa, Homo sapiens
EQIHNLEDR

SEQ ID NO: 1307 - protein, 12 aa, Homo sapiens
AVMGIFSLVTGK

SEQ ID NO: 1308 - protein, 11 aa, Homo sapiens
ENLALQNVQAR

SEQ ID NO: 1309 - protein, 14 aa, Homo sapiens
SLNDEKLETYDEEK

SEQ ID NO: 1310 - protein, 12 aa, Homo sapiens
VSNENLDYAILK

SEQ ID NO: 1311 - protein, 8 aa, Homo sapiens
TQDLPGVK

SEQ ID NO: 1312 - protein, 25 aa, Homo sapiens
EAVCFIPGEGHTLQEHQIVLVEGGR

SEQ ID NO: 1313 - protein, 9 aa, Homo sapiens
GVVLCTFTR

SEQ ID NO: 1314 - protein, 23 aa, Homo sapiens
LQTQEKPNTTVQVPAFLQELVDR

SEQ ID NO: 1315 - protein, 14 aa, Homo sapiens
LLSLPCTLNLQLMR

SEQ ID NO: 1316 - protein, 14 aa, Homo sapiens
NDSEQFAALLLVTK

SEQ ID NO: 1317 - protein, 18 aa, Homo sapiens
LAHACGSDWIPAGSSGSK

SEQ ID NO: 1318 - protein, 11 aa, Homo sapiens
EAEPDLLAVLR

SEQ ID NO: 1319 - protein, 11 aa, Homo sapiens
EVCQLLPFLVR

SEQ ID NO: 1320 - protein, 12 aa, Homo sapiens
IFDAVGFTFPNR

SEQ ID NO: 1321 - protein, 11 aa, Homo sapiens
IPILSTFLTAR

SEQ ID NO: 1322 - protein, 15 aa, Homo sapiens
LLSTSPALQGTPASR

SEQ ID NO: 1323 - protein, 12 aa, Homo sapiens
LQAGEETASHYR

SEQ ID NO: 1324 - protein, 18 aa, Homo sapiens
SMIDDTYQCLTAVAGTPR

SEQ ID NO: 1325 - protein, 14 aa, Homo sapiens
NDSFIVDLFQGQYK

SEQ ID NO: 1326 - protein, 16 aa, Homo sapiens
ELECAEDPGSAGEAAR

SEQ ID NO: 1327 - protein, 29 aa, Homo sapiens
VAVPTGPTPLDSTPPGGAPHPLTGQEEAR

SEQ ID NO: 1328 - protein, 9 aa, Homo sapiens
VLPVFYFAR

SEQ ID NO: 1329 - protein, 29 aa, Homo sapiens
YVAQAGLEPLASGDPSASASHAAGITGSR

SEQ ID NO: 1330 - protein, 13 aa, Homo sapiens
VADGQTVQGEVWK

SEQ ID NO: 1331 - protein, 13 aa, Homo sapiens
AAEALAAEAVASR

SEQ ID NO: 1332 - protein, 15 aa, Homo sapiens
GNISTSSKPASTSGK

SEQ ID NO: 1333 - protein, 12 aa, Homo sapiens
GIPIGMLVLGNK

SEQ ID NO: 1334 - protein, 13 aa, Homo sapiens
GSTPTQISEIIIK

SEQ ID NO: 1335 - protein, 12 aa, Homo sapiens
NAIAETIIALTK

SEQ ID NO: 1336 - protein, 14 aa, Homo sapiens
SHPSLQSEQIGIVK

SEQ ID NO: 1337 - protein, 15 aa, Homo sapiens
LISGDAEPTPEQEEK

SEQ ID NO: 1338 - protein, 10 aa, Homo sapiens
FPLLVAHMEK

SEQ ID NO: 1339 - protein, 17 aa, Homo sapiens
GNLFGEMAQLAVGGPEK

SEQ ID NO: 1340 - protein, 14 aa, Homo sapiens
SEFDGDLQSQLLSK

SEQ ID NO: 1341 - protein, 11 aa, Homo sapiens
SYSVVASEYDK

SEQ ID NO: 1342 - protein, 12 aa, Homo sapiens
WLQPDSYADPQK

SEQ ID NO: 1343 - protein, 12 aa, Homo sapiens
ITFGFISCPICK

SEQ ID NO: 1344 - protein, 15 aa, Homo sapiens
CSILSPELALPTGSR

SEQ ID NO: 1345 - protein, 13 aa, Homo sapiens
ELWCYNAVVADAR

SEQ ID NO: 1346 - protein, 16 aa, Homo sapiens
GTYTTDDSPSDIAEIR

SEQ ID NO: 1347 - protein, 17 aa, Homo sapiens
GVTTVTLPMIFNSSYLR

SEQ ID NO: 1348 - protein, 31 aa, Homo sapiens
LFELGPDGGDHETDGDLLAETDVLAYDCAAR

SEQ ID NO: 1349 - protein, 13 aa, Homo sapiens
LGILDMFLGCIAK

SEQ ID NO: 1350 - protein, 15 aa, Homo sapiens
LSQSEENISGMTSFR

SEQ ID NO: 1351 - protein, 16 aa, Homo sapiens
LTSIFPIAYDGEVLLR

SEQ ID NO: 1352 - protein, 8 aa, Homo sapiens
NCEAETLR

SEQ ID NO: 1353 - protein, 12 aa, Homo sapiens
QAMSPSVAECAR

SEQ ID NO: 1354 - protein, 13 aa, Homo sapiens
SWLGYAQGYLLYR

SEQ ID NO: 1355 - protein, 11 aa, Homo sapiens
VYENYSFEELR

SEQ ID NO: 1356 - protein, 8 aa, Homo sapiens
MDQLLLEK

SEQ ID NO: 1357 - protein, 10 aa, Homo sapiens
EAQEEIAFLK

SEQ ID NO: 1358 - protein, 10 aa, Homo sapiens
VCDTLQGENK

SEQ ID NO: 1359 - protein, 23 aa, Homo sapiens
DEQLLHLSSQLEDSYNQVQSFSK

SEQ ID NO: 1360 - protein, 13 aa, Homo sapiens
IAELEEELVCVQK

SEQ ID NO: 1361 - protein, 9 aa, Homo sapiens
QMNQTLQDK

SEQ ID NO: 1362 - protein, 15 aa, Homo sapiens
KEEDVSYLSGQLSEK

SEQ ID NO: 1363 - protein, 20 aa, Homo sapiens
TNQIDLLQAEISENQAIIQK

SEQ ID NO: 1364 - protein, 11 aa, Homo sapiens
DSLSEEVQDLK

SEQ ID NO: 1365 - protein, 14 aa, Homo sapiens
SLADVESQVSAQNK

SEQ ID NO: 1366 - protein, 18 aa, Homo sapiens
ENQQHYGDLLNHCAVLEK

SEQ ID NO: 1367 - protein, 13 aa, Homo sapiens
IQTEIIEQEDLIK

SEQ ID NO: 1368 - protein, 19 aa, Homo sapiens
DFSSHDEINNYLQQIDQLK

SEQ ID NO: 1369 - protein, 20 aa, Homo sapiens
NLQQQYLQINQEITELHPLK

SEQ ID NO: 1370 - protein, 15 aa, Homo sapiens
IQQLNSNFSQLLEEK

SEQ ID NO: 1371 - protein, 9 aa, Homo sapiens
QGLEIESLK

SEQ ID NO: 1372 - protein, 10 aa, Homo sapiens
AQTEVQLQQK

SEQ ID NO: 1373 - protein, 11 aa, Homo sapiens
ALEFVQTESQK

SEQ ID NO: 1374 - protein, 19 aa, Homo sapiens
SSSAEESGQDVLENTFSQK

SEQ ID NO: 1375 - protein, 13 aa, Homo sapiens
LEEELANLKDESK

SEQ ID NO: 1376 - protein, 19 aa, Homo sapiens
AQGGTVLPTEPQSEEQLSK

SEQ ID NO: 1377 - protein, 23 aa, Homo sapiens
DKEVQQLQENLDSTVTQLAAFTK

SEQ ID NO: 1378 - protein, 8 aa, Homo sapiens
FQSLMSEK

SEQ ID NO: 1379 - protein, 26 aa, Homo sapiens
LLQDKNEQAVQSAQTIQQLEDQLQQK

SEQ ID NO: 1380 - protein, 11 aa, Homo sapiens
QMEGEGIAPIK

SEQ ID NO: 1381 - protein, 18 aa, Homo sapiens
LITSNTDASDGDSVALVK

SEQ ID NO: 1382 - protein, 9 aa, Homo sapiens
SLQSQLQNK

SEQ ID NO: 1383 - protein, 17 aa, Homo sapiens
AQVVDLLQQELTAAEQR

SEQ ID NO: 1384 - protein, 12 aa, Homo sapiens
EEAIQVAIAELR

SEQ ID NO: 1385 - protein, 8 aa, Homo sapiens
EISQFLNR

SEQ ID NO: 1386 - protein, 9 aa, Homo sapiens
ELSMVTELR

SEQ ID NO: 1387 - protein, 8 aa, Homo sapiens
EVELQHIR

SEQ ID NO: 1388 - protein, 18 aa, Homo sapiens
EYEILLQSYENVSNEAER

SEQ ID NO: 1389 - protein, 14 aa, Homo sapiens
FSYEQLETDLQASR

SEQ ID NO: 1390 - protein, 11 aa, Homo sapiens
GLTAQIQSFGR

SEQ ID NO: 1391 - protein, 9 aa, Homo sapiens
LDAELIQYR

SEQ ID NO: 1392 - protein, 14 aa, Homo sapiens
MNLLNQQIQEELSR

SEQ ID NO: 1393 - protein, 11 aa, Homo sapiens
QLEMNLAEAER

SEQ ID NO: 1394 - protein, 10 aa, Homo sapiens
SLQEELSLAR

SEQ ID NO: 1395 - protein, 18 aa, Homo sapiens
SLSAVPDIGQCHQDELER

SEQ ID NO: 1396 - protein, 8 aa, Homo sapiens
SSWEIHER

SEQ ID NO: 1397 - protein, 15 aa, Homo sapiens
VAAENALSVAEEQIR

SEQ ID NO: 1398 - protein, 10 aa, Homo sapiens
SQYERPNETK

SEQ ID NO: 1399 - protein, 14 aa, Homo sapiens
GTFDVIGLYEEAIK

SEQ ID NO: 1400 - protein, 11 aa, Homo sapiens
QMGNLEDAETK

SEQ ID NO: 1401 - protein, 14 aa, Homo sapiens
ASELHLLETPLVVK

SEQ ID NO: 1402 - protein, 13 aa, Homo sapiens
LPFTDTEQECLVK

SEQ ID NO: 1403 - protein, 15 aa, Homo sapiens
SVENQESVEIINDLK

SEQ ID NO: 1404 - protein, 15 aa, Homo sapiens
SSQLLEPAVEETTKK

SEQ ID NO: 1405 - protein, 12 aa, Homo sapiens
KTTEVTGTGLGR

SEQ ID NO: 1406 - protein, 14 aa, Homo sapiens
SAQQEASADVATPK

SEQ ID NO: 1407 - protein, 16 aa, Homo sapiens
SILVPNEELSMVMSSK

SEQ ID NO: 1408 - protein, 12 aa, Homo sapiens
VAIAENLLDVIK

SEQ ID NO: 1409 - protein, 10 aa, Homo sapiens
SVFINNVLSK

SEQ ID NO: 1410 - protein, 12 aa, Homo sapiens
VDTLPYVPEPIK

SEQ ID NO: 1411 - protein, 15 aa, Homo sapiens
FSGVNEQPPVVLAVK

SEQ ID NO: 1412 - protein, 13 aa, Homo sapiens
LISPLASPADGVK

SEQ ID NO: 1413 - protein, 10 aa, Homo sapiens
CMVEAWNFLR

SEQ ID NO: 1414 - protein, 14 aa, Homo sapiens
EISEASENIYSDVR

SEQ ID NO: 1415 - protein, 12 aa, Homo sapiens
ESAWSPPPIEIR

SEQ ID NO: 1416 - protein, 26 aa, Homo sapiens
EYYIQLESGQVPVYAVTFQEPENDPR

SEQ ID NO: 1417 - protein, 16 aa, Homo sapiens
GLSQNQQIPQNSVTPR

SEQ ID NO: 1418 - protein, 15 aa, Homo sapiens
LCYNYPVIQNYYTSR

SEQ ID NO: 1419 - protein, 11 aa, Homo sapiens
LLDLVVQPVPR

SEQ ID NO: 1420 - protein, 15 aa, Homo sapiens
SGPSLNELIPDGYNR

SEQ ID NO: 1421 - protein, 14 aa, Homo sapiens
WITEEQPNSATNLR

SEQ ID NO: 1422 - protein, 18 aa, Homo sapiens
WNPDCLMIDGLVSQLGER

SEQ ID NO: 1423 - protein, 13 aa, Homo sapiens
YTLDLTGGMFPLR

SEQ ID NO: 1424 - protein, 14 aa, Homo sapiens
KTETAAHSLPQQTK

SEQ ID NO: 1425 - protein, 21 aa, Homo sapiens
QQVQVVGLQEHLVNSADDVIK

SEQ ID NO: 1426 - protein, 11 aa, Homo sapiens
PLVQTIFEGGK

SEQ ID NO: 1427 - protein, 11 aa, Homo sapiens
FSLVDLAGNER

SEQ ID NO: 1428 - protein, 16 aa, Homo sapiens
GPTPAILESLISINNK

SEQ ID NO: 1429 - protein, 14 aa, Homo sapiens
IQSIAPSLQVITSK

SEQ ID NO: 1430 - protein, 16 aa, Homo sapiens
STAMDTLSSLVFQLGK

SEQ ID NO: 1431 - protein, 18 aa, Homo sapiens
LGEWQLNLQGINESTIPK

SEQ ID NO: 1432 - protein, 18 aa, Homo sapiens
DLELAVPGTYDPNQPIIR

SEQ ID NO: 1433 - protein, 14 aa, Homo sapiens
LSSMNPAFVMPFLR

SEQ ID NO: 1434 - protein, 14 aa, Homo sapiens
STAPLLDVFSSMLK

SEQ ID NO: 1435 - protein, 16 aa, Homo sapiens
DLYLIPLSAQDPVPSK

SEQ ID NO: 1436 - protein, 11 aa, Homo sapiens
SGPQSASTAVK

SEQ ID NO: 1437 - protein, 24 aa, Homo sapiens
AYPVSGCFDYLSEDLPDTIHIGGR

SEQ ID NO: 1438 - protein, 9 aa, Homo sapiens
GAQGALPER

SEQ ID NO: 1439 - protein, 16 aa, Homo sapiens
LGAMSAAPSQPNSQIR

SEQ ID NO: 1440 - protein, 15 aa, Homo sapiens
ILLTLVANPYSYTDK

SEQ ID NO: 1441 - protein, 17 aa, Homo sapiens
TAADDDLVADLVVNILK

SEQ ID NO: 1442 - protein, 11 aa, Homo sapiens
FTVNETVLSTK

SEQ ID NO: 1443 - protein, 14 aa, Homo sapiens
AQEGPDAEIIGGER

SEQ ID NO: 1444 - protein, 19 aa, Homo sapiens
DPVLAPAVGADLLDYCLAR

SEQ ID NO: 1445 - protein, 9 aa, Homo sapiens
EVTFSFIPR

SEQ ID NO: 1446 - protein, 12 aa, Homo sapiens
ISTINILLSTLK

SEQ ID NO: 1447 - protein, 10 aa, Homo sapiens
IYEAQPEISR

SEQ ID NO: 1448 - protein, 13 aa, Homo sapiens
PAGVSSAVIPVLR

SEQ ID NO: 1449 - protein, 13 aa, Homo sapiens
SLWQQPSVGDILR

SEQ ID NO: 1450 - protein, 21 aa, Homo sapiens
TPPQLEALQELHPYMEGAQLR

SEQ ID NO: 1451 - protein, 11 aa, Homo sapiens
YYSLWIPEQAR

SEQ ID NO: 1452 - protein, 12 aa, Homo sapiens
IGSTSGAEAANK

SEQ ID NO: 1453 - protein, 9 aa, Homo sapiens
DQLMFDLLK

SEQ ID NO: 1454 - protein, 23 aa, Homo sapiens
TAIENATVAFFLQCISCHPNNQK

SEQ ID NO: 1455 - protein, 15 aa, Homo sapiens
GAFQTGQGPLDAQVK

SEQ ID NO: 1456 - protein, 16 aa, Homo sapiens
LLDYVATVEDEAAAAK

SEQ ID NO: 1457 - protein, 19 aa, Homo sapiens
LQTDSNSWDEHVFELVLPK

SEQ ID NO: 1458 - protein, 14 aa, Homo sapiens
GNLPTSGNISGFIR

SEQ ID NO: 1459 - protein, 18 aa, Homo sapiens
HPQHLHQQHHGDAAQHTR

SEQ ID NO: 1460 - protein, 11 aa, Homo sapiens
LTPMEALLQTR

SEQ ID NO: 1461 - protein, 13 aa, Homo sapiens
MPITADLVAPILR

SEQ ID NO: 1462 - protein, 20 aa, Homo sapiens
NCAASGSDPTDLNSPLLFGR

SEQ ID NO: 1463 - protein, 13 aa, Homo sapiens
QLLDSGLPSLLVR

SEQ ID NO: 1464 - protein, 17 aa, Homo sapiens
SASLSSAATTGLTTQQR

SEQ ID NO: 1465 - protein, 17 aa, Homo sapiens
SLFSTTPLTTDDGVLLR

SEQ ID NO: 1466 - protein, 11 aa, Homo sapiens
VFMLLSCIGQR

SEQ ID NO: 1467 - protein, 29 aa, Homo sapiens
SNSGLGGEVSGVMSKPNVDPQPWFQDGPK

SEQ ID NO: 1468 - protein, 20 aa, Homo sapiens
LPCQPLVPGPELRPSAAELK

SEQ ID NO: 1469 - protein, 13 aa, Homo sapiens
MDKYDDLGLEASK

SEQ ID NO: 1470 - protein, 12 aa, Homo sapiens
FIEDLNMYEASK

SEQ ID NO: 1471 - protein, 16 aa, Homo sapiens
SSEKPTGLWSTASSQR

SEQ ID NO: 1472 - protein, 24 aa, Homo sapiens
EGPLGWSSDGSLGSVLLDSPSSPR

SEQ ID NO: 1473 - protein, 13 aa, Homo sapiens
GAGNNPEFEETRR

SEQ ID NO: 1474 - protein, 18 aa, Homo sapiens
IHLQQQQQQLLQEETLPR

SEQ ID NO: 1475 - protein, 16 aa, Homo sapiens
SSEGSLGGQNSGIGGR

SEQ ID NO: 1476 - protein, 14 aa, Homo sapiens
TPSVSAPLALSCPR

SEQ ID NO: 1477 - protein, 11 aa, Homo sapiens
AEGETESPGPK

SEQ ID NO: 1478 - protein, 14 aa, Homo sapiens
EVVSLLLDDEELEK

SEQ ID NO: 1479 - protein, 10 aa, Homo sapiens
LYALDVLLTR

SEQ ID NO: 1480 - protein, 10 aa, Homo sapiens
SAIDENQLSR

SEQ ID NO: 1481 - protein, 27 aa, Homo sapiens
DDFHNYNVEELLGFLELYNSAATDSEK

SEQ ID NO: 1482 - protein, 11 aa, Homo sapiens
RIEEMEDELQK

SEQ ID NO: 1483 - protein, 11 aa, Homo sapiens
DLIQVVHEYTK

SEQ ID NO: 1484 - protein, 14 aa, Homo sapiens
TNNDKEVNAEHHIK

SEQ ID NO: 1485 - protein, 21 aa, Homo sapiens
DLDPGPVTTEDTPMDAIDANK

SEQ ID NO: 1486 - protein, 17 aa, Homo sapiens
YFNVHELEALLQEMSSK

SEQ ID NO: 1487 - protein, 12 aa, Homo sapiens
ASESQILSIAEK

SEQ ID NO: 1488 - protein, 12 aa, Homo sapiens
VYQVTEQQISEK

SEQ ID NO: 1489 - protein, 11 aa, Homo sapiens
ELEDEVPILGR

SEQ ID NO: 1490 - protein, 12 aa, Homo sapiens
EQLQQEIEDWSK

SEQ ID NO: 1491 - protein, 16 aa, Homo sapiens
FGSTADALVSDDETTR

SEQ ID NO: 1492 - protein, 13 aa, Homo sapiens
GEALEDFTGPDCR

SEQ ID NO: 1493 - protein, 13 aa, Homo sapiens
LCADDECSMLMYR

SEQ ID NO: 1494 - protein, 10 aa, Homo sapiens
LHTLSVEHQR

SEQ ID NO: 1495 - protein, 11 aa, Homo sapiens
QFDVNLQVPDR

SEQ ID NO: 1496 - protein, 18 aa, Homo sapiens
TAELNVQVPEEPTHLDQR

SEQ ID NO: 1497 - protein, 16 aa, Homo sapiens
AASEQQADTSGGDSPK

SEQ ID NO: 1498 - protein, 36 aa, Homo sapiens
HAVPTNSLAGNAYALTSPLQLLATQASSSAPVVVTR

SEQ ID NO: 1499 - protein, 19 aa, Homo sapiens
ESGVGQTDWSGVEAGEFLK

SEQ ID NO: 1500 - protein, 30 aa, Homo sapiens
APVIRPGGTLGLSEAADSDAHLFQDSTEPR

SEQ ID NO: 1501 - protein, 13 aa, Homo sapiens
PLIEVGELLDLTR

SEQ ID NO: 1502 - protein, 15 aa, Homo sapiens
TTAGSVDWTDQLGLR

SEQ ID NO: 1503 - protein, 12 aa, Homo sapiens
VSAPGVLTAQDR

SEQ ID NO: 1504 - protein, 11 aa, Homo sapiens
PLGPHGLDWLK

SEQ ID NO: 1505 - protein, 20 aa, Homo sapiens
NVQQIGILKPHPAYVQLLEK

SEQ ID NO: 1506 - protein, 11 aa, Homo sapiens
AIQHWLTESAR

SEQ ID NO: 1507 - protein, 9 aa, Homo sapiens
ALLEFAQGR

SEQ ID NO: 1508 - protein, 22 aa, Homo sapiens
LAFAEEVMDDILDSADQPLTGR

SEQ ID NO: 1509 - protein, 13 aa, Homo sapiens
QAPESPWEEQLAR

SEQ ID NO: 1510 - protein, 10 aa, Homo sapiens
QDQDAGTIER

SEQ ID NO: 1511 - protein, 14 aa, Homo sapiens
QLQAESVSEVVVNR

SEQ ID NO: 1512 - protein, 10 aa, Homo sapiens
SLQEMFSGTR

SEQ ID NO: 1513 - protein, 11 aa, Homo sapiens
VAQVLEGFITR

SEQ ID NO: 1514 - protein, 13 aa, Homo sapiens
VSGQVQALQNHYR

SEQ ID NO: 1515 - protein, 15 aa, Homo sapiens
VLSVLLNELDGVGLK

SEQ ID NO: 1516 - protein, 19 aa, Homo sapiens
ASTPAILFLDEIDSILGAR

SEQ ID NO: 1517 - protein, 17 aa, Homo sapiens
GPSLLFLDEMDALCPQR

SEQ ID NO: 1518 - protein, 14 aa, Homo sapiens
NTAAVLEAAQELLR

SEQ ID NO: 1519 - protein, 11 aa, Homo sapiens
NIEVVELLLDK

SEQ ID NO: 1520 - protein, 21 aa, Homo sapiens
SVLISQSVINYVEEENIPALK

SEQ ID NO: 1521 - protein, 14 aa, Homo sapiens
LASWINLTEQWPYR

SEQ ID NO: 1522 - protein, 16 aa, Homo sapiens
KLSGLNAFDIAEELVK

SEQ ID NO: 1523 - protein, 15 aa, Homo sapiens
ALQHSYLHKDEGNPE

SEQ ID NO: 1524 - protein, 15 aa, Homo sapiens
IFDLIGLPPEDDWPR

SEQ ID NO: 1525 - protein, 17 aa, Homo sapiens
GMQGASANTLNSETSTK

SEQ ID NO: 1526 - protein, 14 aa, Homo sapiens
TFLEALPQESWQNK

SEQ ID NO: 1527 - protein, 13 aa, Homo sapiens
EIMSHFTALQCPR

SEQ ID NO: 1528 - protein, 12 aa, Homo sapiens
LVSIPELLSAVK

SEQ ID NO: 1529 - protein, 18 aa, Homo sapiens
FLLVGQTMPTLLDEDLTK

SEQ ID NO: 1530 - protein, 9 aa, Homo sapiens
LLTSSAVHK

SEQ ID NO: 1531 - protein, 14 aa, Homo sapiens
GEVLEGSNAYYCEK

SEQ ID NO: 1532 - protein, 23 aa, Homo sapiens
IQSGQSSTVIENIHTIIAAAAVK

SEQ ID NO: 1533 - protein, 13 aa, Homo sapiens
FQPDLVTIVDDLR

SEQ ID NO: 1534 - protein, 17 aa, Homo sapiens
SSQLNNPQFVWVVPALR

SEQ ID NO: 1535 - protein, 12 aa, Homo sapiens
VYDQTNPYTDVR

SEQ ID NO: 1536 - protein, 11 aa, Homo sapiens
VQVSLDEHFSK

SEQ ID NO: 1537 - protein, 7 aa, Homo sapiens
LFQLTEK

SEQ ID NO: 1538 - protein, 11 aa, Homo sapiens
ITVLQLSALLK

SEQ ID NO: 1539 - protein, 12 aa, Homo sapiens
FADKETLIQFLR

SEQ ID NO: 1540 - protein, 14 aa, Homo sapiens
YILQLAQEYCGDCK

SEQ ID NO: 1541 - protein, 25 aa, Homo sapiens
GHWANPDLASSLQYEMLLLTDSISK

SEQ ID NO: 1542 - protein, 16 aa, Homo sapiens
LLTSLFQDLQVEALHK

SEQ ID NO: 1543 - protein, 21 aa, Homo sapiens
IYDLCVDALSPTFYFLLPSSK

SEQ ID NO: 1544 - protein, 11 aa, Homo sapiens
YGSFFCDCGAK

SEQ ID NO: 1545 - protein, 10 aa, Homo sapiens
EDGSCLALVK

SEQ ID NO: 1546 - protein, 11 aa, Homo sapiens
AVSNINTLLDK

SEQ ID NO: 1547 - protein, 13 aa, Homo sapiens
AQQALSELHTVEK

SEQ ID NO: 1548 - protein, 19 aa, Homo sapiens
LASAPVPFTVLSLTGNPCK

SEQ ID NO: 1549 - protein, 17 aa, Homo sapiens
SIAIMRPNNLVHFTESK

SEQ ID NO: 1550 - protein, 19 aa, Homo sapiens
SINYDEKDPFLCNACGFCK

SEQ ID NO: 1551 - protein, 33 aa, Homo sapiens
VLAALAASSGSSSASSSSAPVAASSGQATTQSK

SEQ ID NO: 1552 - protein, 12 aa, Homo sapiens
ALGTLGMTTNEK

SEQ ID NO: 1553 - protein, 9 aa, Homo sapiens
VLGIYTFTK

SEQ ID NO: 1554 - protein, 18 aa, Homo sapiens
AYLLQNFNEEGTTEKPSK

SEQ ID NO: 1555 - protein, 23 aa, Homo sapiens
GLAIQHPGTQVLIGTDSIPNLHK

SEQ ID NO: 1556 - protein, 14 aa, Homo sapiens
AAQFVDLLGYFSLK

SEQ ID NO: 1557 - protein, 7 aa, Homo sapiens
HLYLTEK

SEQ ID NO: 1558 - protein, 19 aa, Homo sapiens
NVFIAQNVASLQELGGSEK

SEQ ID NO: 1559 - protein, 28 aa, Homo sapiens
VNEAAPEKPQDDSGTAGGISSTSASVNR

SEQ ID NO: 1560 - protein, 7 aa, Homo sapiens
LKEYSQK

SEQ ID NO: 1561 - protein, 12 aa, Homo sapiens
IIPYLSFGEVEK

SEQ ID NO: 1562 - protein, 11 aa, Homo sapiens
GITQNALDYMK

SEQ ID NO: 1563 - protein, 25 aa, Homo sapiens
ASVVTASSGSALQYDTLISLMEHLK

SEQ ID NO: 1564 - protein, 14 aa, Homo sapiens
ASAQGDPDVPECLK

SEQ ID NO: 1565 - protein, 20 aa, Homo sapiens
TLSDVEDQKELASPVSPELR

SEQ ID NO: 1566 - protein, 13 aa, Homo sapiens
IISLDLPVAEVYK

SEQ ID NO: 1567 - protein, 16 aa, Homo sapiens
GREEWESAALQNANTK

SEQ ID NO: 1568 - protein, 16 aa, Homo sapiens
DNPEATQQMNDLIIGK

SEQ ID NO: 1569 - protein, 14 aa, Homo sapiens
TTLEVLQLFPINIK

SEQ ID NO: 1570 - protein, 14 aa, Homo sapiens
ALSVLGCGHTSSTK

SEQ ID NO: 1571 - protein, 13 aa, Homo sapiens
LENPDEACAVSQK

SEQ ID NO: 1572 - protein, 15 aa, Homo sapiens
AEHASSLLELASTTK

SEQ ID NO: 1573 - protein, 9 aa, Homo sapiens
ACAEIAAQR

SEQ ID NO: 1574 - protein, 9 aa, Homo sapiens
ALATNPALR

SEQ ID NO: 1575 - protein, 24 aa, Homo sapiens
AVEMTDQLMVPTLGSQEGAFENVR

SEQ ID NO: 1576 - protein, 12 aa, Homo sapiens
CFLLESNSSSVR

SEQ ID NO: 1577 - protein, 9 aa, Homo sapiens
DLDPEVFQR

SEQ ID NO: 1578 - protein, 10 aa, Homo sapiens
DLHTLDSHVR

SEQ ID NO: 1579 - protein, 12 aa, Homo sapiens
DSDQLDVIQENR

SEQ ID NO: 1580 - protein, 10 aa, Homo sapiens
ELLEYDLQQR

SEQ ID NO: 1581 - protein, 24 aa, Homo sapiens
FQDAVLANSFFIMPATVADATAVR

SEQ ID NO: 1582 - protein, 8 aa, Homo sapiens
FVPLILAR

SEQ ID NO: 1583 - protein, 22 aa, Homo sapiens
GWETDGPPAALSIMAQSTSIQR

SEQ ID NO: 1584 - protein, 11 aa, Homo sapiens
HFSSDAVPHPR

SEQ ID NO: 1585 - protein, 10 aa, Homo sapiens
HILVSQGLIR

SEQ ID NO: 1586 - protein, 8 aa, Homo sapiens
HTLLSLVR

SEQ ID NO: 1587 - protein, 13 aa, Homo sapiens
ILGPAESDEFLAR

SEQ ID NO: 1588 - protein, 10 aa, Homo sapiens
IQIGTQAIER

SEQ ID NO: 1589 - protein, 22 aa, Homo sapiens
LEQVSSDEGIGTLAENLLEALR

SEQ ID NO: 1590 - protein, 10 aa, Homo sapiens
LLEEQGIFLR

SEQ ID NO: 1591 - protein, 7 aa, Homo sapiens
LQAWLTR

SEQ ID NO: 1592 - protein, 17 aa, Homo sapiens
MAGVMAQCGGLECMLNR

SEQ ID NO: 1593 - protein, 12 aa, Homo sapiens
MNYSGDQGQTIR

SEQ ID NO: 1594 - protein, 18 aa, Homo sapiens
MPGNPYSSNEPGIGPLMR

SEQ ID NO: 1595 - protein, 8 aa, Homo sapiens
PALPFILR

SEQ ID NO: 1596 - protein, 16 aa, Homo sapiens
QAACTIVEALATIPSR

SEQ ID NO: 1597 - protein, 9 aa, Homo sapiens
QLISAHVLR

SEQ ID NO: 1598 - protein, 8 aa, Homo sapiens
QLMCLLTR

SEQ ID NO: 1599 - protein, 12 aa, Homo sapiens
SALNEVHLVVMR

SEQ ID NO: 1600 - protein, 8 aa, Homo sapiens
SFAATISR

SEQ ID NO: 1601 - protein, 24 aa, Homo sapiens
TLLPLLLESSTESVAEISSNSLER

SEQ ID NO: 1602 - protein, 8 aa, Homo sapiens
TMQLNLSR

SEQ ID NO: 1603 - protein, 31 aa, Homo sapiens
TSPADHGGSVGSESGGSAVDSVAGEHSVSGR

SEQ ID NO: 1604 - protein, 13 aa, Homo sapiens
TSVQPTFTASQYR

SEQ ID NO: 1605 - protein, 10 aa, Homo sapiens
VCLNLPYFLR

SEQ ID NO: 1606 - protein, 19 aa, Homo sapiens
VPTSNTEGGWSCSLAEYIR

SEQ ID NO: 1607 - protein, 8 aa, Homo sapiens
WFDFPFTR

SEQ ID NO: 1608 - protein, 12 aa, Homo sapiens
YDVEIVEEYFAR

SEQ ID NO: 1609 - protein, 7 aa, Homo sapiens
YNLDDYR

SEQ ID NO: 1610 - protein, 13 aa, Homo sapiens
VDLEELIECATGK

SEQ ID NO: 1611 - protein, 14 aa, Homo sapiens
ASEVQEFTAEFLEK

SEQ ID NO: 1612 - protein, 15 aa, Homo sapiens
ITHVVSSTMMAGLLR

SEQ ID NO: 1613 - protein, 15 aa, Homo sapiens
SWDEEEEDEYDYFVR

SEQ ID NO: 1614 - protein, 14 aa, Homo sapiens
KIPGVPIMYISNHR

SEQ ID NO: 1615 - protein, 11 aa, Homo sapiens
GTYADDCLVQR

SEQ ID NO: 1616 - protein, 13 aa, Homo sapiens
IPGVPIMYISNHR

SEQ ID NO: 1617 - protein, 9 aa, Homo sapiens
MPDDYGAPR

SEQ ID NO: 1618 - protein, 24 aa, Homo sapiens
AVYSNADIYLFDDPLSAVDAHVGK

SEQ ID NO: 1619 - protein, 15 aa, Homo sapiens
ENILFGCQLEEPYYR

SEQ ID NO: 1620 - protein, 13 aa, Homo sapiens
ISEMGSYQELLAR

SEQ ID NO: 1621 - protein, 16 aa, Homo sapiens
ITIIPQDPVLFSGSLR

SEQ ID NO: 1622 - protein, 9 aa, Homo sapiens
RQTFITLEK

SEQ ID NO: 1623 - protein, 17 aa, Homo sapiens
SLIDNFALNPDILCSAK

SEQ ID NO: 1624 - protein, 15 aa, Homo sapiens
MTGEEGKEVITEIEK

SEQ ID NO: 1625 - protein, 16 aa, Homo sapiens
ITSELSEANALELLSK

SEQ ID NO: 1626 - protein, 17 aa, Homo sapiens
LVSDIIDPVALEIPLSK

SEQ ID NO: 1627 - protein, 13 aa, Homo sapiens
GLEEIPVFDISEK

SEQ ID NO: 1628 - protein, 12 aa, Homo sapiens
IGISDISSLSEK

SEQ ID NO: 1629 - protein, 14 aa, Homo sapiens
LIAEQTLQENLIEK

SEQ ID NO: 1630 - protein, 17 aa, Homo sapiens
YAEYSFTSLPVPESNLR

SEQ ID NO: 1631 - protein, 10 aa, Homo sapiens
LSCMANSVIK

SEQ ID NO: 1632 - protein, 18 aa, Homo sapiens
IMSSLEDEGFSNLLFVDR

SEQ ID NO: 1633 - protein, 15 aa, Homo sapiens
LIEQAPIQMGEEAVR

SEQ ID NO: 1634 - protein, 17 aa, Homo sapiens
SGSFINSLLQLEELGFR

SEQ ID NO: 1635 - protein, 9 aa, Homo sapiens
MELPAVNLK

SEQ ID NO: 1636 - protein, 17 aa, Homo sapiens
GGELLVHTGFLGSSQDR

SEQ ID NO: 1637 - protein, 22 aa, Homo sapiens
SAYQTIDSAEAPADPFAVPEGR

SEQ ID NO: 1638 - protein, 8 aa, Homo sapiens
VSLTDTGR

SEQ ID NO: 1639 - protein, 13 aa, Homo sapiens
DFTDIQQDFLPWK

SEQ ID NO: 1640 - protein, 16 aa, Homo sapiens
GSMCNTLFSDAILEYK

SEQ ID NO: 1641 - protein, 7 aa, Homo sapiens
HYHIPVF

SEQ ID NO: 1642 - protein, 28 aa, Homo sapiens
SPTSVGAFPSTSAFGQEAGEIVNSGFGK

SEQ ID NO: 1643 - protein, 9 aa, Homo sapiens
DWYDFVWNR

SEQ ID NO: 1644 - protein, 26 aa, Homo sapiens
YIGESLAAELPVSTQRPGSDTVGGGR

SEQ ID NO: 1645 - protein, 14 aa, Homo sapiens
YTSVVTLVKPHLVK

SEQ ID NO: 1646 - protein, 10 aa, Homo sapiens
ELMLHEVHHT

SEQ ID NO: 1647 - protein, 10 aa, Homo sapiens
FSPGLPGYPR

SEQ ID NO: 1648 - protein, 11 aa, Homo sapiens
LEIGFPPVLER

SEQ ID NO: 1649 - protein, 10 aa, Homo sapiens
LYGPETNIPR

SEQ ID NO: 1650 - protein, 10 aa, Homo sapiens
YIVTCAVVQK

SEQ ID NO: 1651 - protein, 17 aa, Homo sapiens
HCDEVGFNAEEAHNIVK

SEQ ID NO: 1652 - protein, 18 aa, Homo sapiens
GCNGGFMTTAFQYIIDNK

SEQ ID NO: 1653 - protein, 16 aa, Homo sapiens
LVSLSAQNLVDCSTEK

SEQ ID NO: 1654 - protein, 11 aa, Homo sapiens
GIDSDASYPYK

SEQ ID NO: 1655 - protein, 15 aa, Homo sapiens
GNHCGIASFPSYPEI

SEQ ID NO: 1656 - protein, 10 aa, Homo sapiens
GPVSVGVDAR

SEQ ID NO: 1657 - protein, 8 aa, Homo sapiens
HPSFFLYR

SEQ ID NO: 1658 - protein, 14 aa, Homo sapiens
NSWGHNFGEEGYIR

SEQ ID NO: 1659 - protein, 8 aa, Homo sapiens
YTELPYGR

SEQ ID NO: 1660 - protein, 11 aa, Homo sapiens
EDAVNWLSGLK

SEQ ID NO: 1661 - protein, 9 aa, Homo sapiens
TILPLINFK

SEQ ID NO: 1662 - protein, 14 aa, Homo sapiens
STTVNVDSLAEYEK

SEQ ID NO: 1663 - protein, 25 aa, Homo sapiens
DSSVFILGNTDRPDASAVYLHDFQR

SEQ ID NO: 1664 - protein, 15 aa, Homo sapiens
ESETFPNDYTLSFWR

SEQ ID NO: 1665 - protein, 9 aa, Homo sapiens
GEAEDMLMR

SEQ ID NO: 1666 - protein, 20 aa, Homo sapiens
ILHQEAMNASTPTIIESWLR

SEQ ID NO: 1667 - protein, 10 aa, Homo sapiens
SESSPEAYIR

SEQ ID NO: 1668 - protein, 11 aa, Homo sapiens
TGYVLQPESMR

SEQ ID NO: 1669 - protein, 12 aa, Homo sapiens
VVEEEKQEHVEK

SEQ ID NO: 1670 - protein, 10 aa, Homo sapiens
QLEDILVLAK

SEQ ID NO: 1671 - protein, 12 aa, Homo sapiens
LQNVQIALDFLK

SEQ ID NO: 1672 - protein, 9 aa, Homo sapiens
LREFQESFK

SEQ ID NO: 1673 - protein, 12 aa, Homo sapiens
LDQMVFFWEDIK

SEQ ID NO: 1674 - protein, 12 aa, Homo sapiens
IAQSAELADREK

SEQ ID NO: 1675 - protein, 8 aa, Homo sapiens
TIVQLKPR

SEQ ID NO: 1676 - protein, 19 aa, Homo sapiens
LFGEDEVEVLNWLAEVEDK

SEQ ID NO: 1677 - protein, 12 aa, Homo sapiens
EANSVLQWLESK

SEQ ID NO: 1678 - protein, 11 aa, Homo sapiens
QEFIDGILASK

SEQ ID NO: 1679 - protein, 13 aa, Homo sapiens
NSVFSVLDEEIAK

SEQ ID NO: 1680 - protein, 8 aa, Homo sapiens
FVTISGQK

SEQ ID NO: 1681 - protein, 19 aa, Homo sapiens
DGDGYIDYYEFVAALHPNK

SEQ ID NO: 1682 - protein, 16 aa, Homo sapiens
TDLTEIQCDMSDVNLK

SEQ ID NO: 1683 - protein, 13 aa, Homo sapiens
FWYDMAALLTTIK

SEQ ID NO: 1684 - protein, 19 aa, Homo sapiens
SLSQPTPPPMPILSQSEAK

SEQ ID NO: 1685 - protein, 12 aa, Homo sapiens
HKDSMDELFSHR

SEQ ID NO: 1686 - protein, 9 aa, Homo sapiens
DKWDTVCGK

SEQ ID NO: 1687 - protein, 15 aa, Homo sapiens
QLQEELAEHQVPVEK

SEQ ID NO: 1688 - protein, 15 aa, Homo sapiens
AILEQQVLSEELTTK

SEQ ID NO: 1689 - protein, 13 aa, Homo sapiens
LQSQLQENEEFQK

SEQ ID NO: 1690 - protein, 10 aa, Homo sapiens
FQVEQIGENK

SEQ ID NO: 1691 - protein, 18 aa, Homo sapiens
DAYRPTTDADKIEDEVTR

SEQ ID NO: 1692 - protein, 13 aa, Homo sapiens
IAQLQEALLHCGK

SEQ ID NO: 1693 - protein, 14 aa, Homo sapiens
VGGGWMALDEFLVK

SEQ ID NO: 1694 - protein, 17 aa, Homo sapiens
SLQDTAELLSLENHPAK

SEQ ID NO: 1695 - protein, 21 aa, Homo sapiens
ELMMGVLGPLSIDPNMLNAQK

SEQ ID NO: 1696 - protein, 12 aa, Homo sapiens
AKEETYNQLLDK

SEQ ID NO: 1697 - protein, 10 aa, Homo sapiens
FLDVLELAEK

SEQ ID NO: 1698 - protein, 19 aa, Homo sapiens
TSLAGDTSNSSSPASTGAK

SEQ ID NO: 1699 - protein, 15 aa, Homo sapiens
LSVQSAISTQPEAVK

SEQ ID NO: 1700 - protein, 12 aa, Homo sapiens
VEVYQQQIEMEK

SEQ ID NO: 1701 - protein, 14 aa, Homo sapiens
LLPQAEMFEHLSGK

SEQ ID NO: 1702 - protein, 13 aa, Homo sapiens
QTTGEEVLLIQEK

SEQ ID NO: 1703 - protein, 10 aa, Homo sapiens
SSQIDQAIVK

SEQ ID NO: 1704 - protein, 12 aa, Homo sapiens
NIEPTHAPFIEK

SEQ ID NO: 1705 - protein, 11 aa, Homo sapiens
FEQLCLQQQEK

SEQ ID NO: 1706 - protein, 15 aa, Homo sapiens
NDVLAHQATVETVNK

SEQ ID NO: 1707 - protein, 14 aa, Homo sapiens
DQIIELDQTGNQLK

SEQ ID NO: 1708 - protein, 21 aa, Homo sapiens
LLSDTVASDPGVLQEQLATTK

SEQ ID NO: 1709 - protein, 12 aa, Homo sapiens
AFLAELEQNSPK

SEQ ID NO: 1710 - protein, 26 aa, Homo sapiens
QLEESASHLACFQAAESQLRPWLMEK

SEQ ID NO: 1711 - protein, 14 aa, Homo sapiens
LEQDQTTAQLQVQK

SEQ ID NO: 1712 - protein, 11 aa, Homo sapiens
TTQQDLSALQK

SEQ ID NO: 1713 - protein, 13 aa, Homo sapiens
ELNPEEGEMVEEK

SEQ ID NO: 1714 - protein, 15 aa, Homo sapiens
EQYSTSLAQSEAELK

SEQ ID NO: 1715 - protein, 20 aa, Homo sapiens
IGQSLSSLTSPAEQGVLSEK

SEQ ID NO: 1716 - protein, 14 aa, Homo sapiens
STQYQELLQDLSEK

SEQ ID NO: 1717 - protein, 18 aa, Homo sapiens
ALEEDIENHATDVHQAVK

SEQ ID NO: 1718 - protein, 11 aa, Homo sapiens
MPPLIPAEVDK

SEQ ID NO: 1719 - protein, 13 aa, Homo sapiens
GGSSPETLPSLLK

SEQ ID NO: 1720 - protein, 10 aa, Homo sapiens
LVSDANEQYK

SEQ ID NO: 1721 - protein, 11 aa, Homo sapiens
TEQSVALLEQK

SEQ ID NO: 1722 - protein, 15 aa, Homo sapiens
LLDAEDVDVPSPDEK

SEQ ID NO: 1723 - protein, 16 aa, Homo sapiens
ELEEAVTSALQQETEK

SEQ ID NO: 1724 - protein, 10 aa, Homo sapiens
SIQDAELLVK

SEQ ID NO: 1725 - protein, 26 aa, Homo sapiens
VEPQLAEDQPVHGDLDLVMNLMDAHK

SEQ ID NO: 1726 - protein, 17 aa, Homo sapiens
AGINQNMDAVTEELQAK

SEQ ID NO: 1727 - protein, 23 aa, Homo sapiens
VISPTGNEAMVPSVCFLIPPPNK

SEQ ID NO: 1728 - protein, 13 aa, Homo sapiens
EGKEPSEIGNLVK

SEQ ID NO: 1729 - protein, 19 aa, Homo sapiens
LEDLLQDSMDEKEQLIQSK

SEQ ID NO: 1730 - protein, 18 aa, Homo sapiens
GALPDDTEALQSLIDTHK

SEQ ID NO: 1731 - protein, 12 aa, Homo sapiens
AALLDQALSNAR

SEQ ID NO: 1732 - protein, 16 aa, Homo sapiens
AELVAISSSEDEGNLR

SEQ ID NO: 1733 - protein, 18 aa, Homo sapiens
AGNELLESSAGDDASSLR

SEQ ID NO: 1734 - protein, 17 aa, Homo sapiens
ALIAQLPSPAIDHEQLR

SEQ ID NO: 1735 - protein, 9 aa, Homo sapiens
ALLELVPWR

SEQ ID NO: 1736 - protein, 17 aa, Homo sapiens
AQQEVLQALEPQVDYLR

SEQ ID NO: 1737 - protein, 12 aa, Homo sapiens
ATVDMLQAEGGR

SEQ ID NO: 1738 - protein, 17 aa, Homo sapiens
DCDVQGLEHDMEEINAR

SEQ ID NO: 1739 - protein, 13 aa, Homo sapiens
DENYYQLEELAFR

SEQ ID NO: 1740 - protein, 14 aa, Homo sapiens
DIMEIEGEPAPDHR

SEQ ID NO: 1741 - protein, 11 aa, Homo sapiens
DQEPIPQNIDR

SEQ ID NO: 1742 - protein, 11 aa, Homo sapiens
EFANFDFDVWR

SEQ ID NO: 1743 - protein, 11 aa, Homo sapiens
ELLGWVSTLAR

SEQ ID NO: 1744 - protein, 21 aa, Homo sapiens
EMFSQLADLDDELDGMGAIGR

SEQ ID NO: 1745 - protein, 12 aa, Homo sapiens
ENLEQAFEVAER

SEQ ID NO: 1746 - protein, 13 aa, Homo sapiens
ENTAYFQFFSDAR

SEQ ID NO: 1747 - protein, 11 aa, Homo sapiens
EQYEALQEETR

SEQ ID NO: 1748 - protein, 25 aa, Homo sapiens
EVEEELATSGGQSPTGEQIPQFQQR

SEQ ID NO: 1749 - protein, 8 aa, Homo sapiens
FGDSQQLR

SEQ ID NO: 1750 - protein, 13 aa, Homo sapiens
FQSTYEELTGWLR

SEQ ID NO: 1751 - protein, 9 aa, Homo sapiens
GQLQELSTR

SEQ ID NO: 1752 - protein, 23 aa, Homo sapiens
HVQETTDSILSHFQSLSYSLAER

SEQ ID NO: 1753 - protein, 15 aa, Homo sapiens
IAEQEHTQEDLQQLR

SEQ ID NO: 1754 - protein, 10 aa, Homo sapiens
IAQSAELADR

SEQ ID NO: 1755 - protein, 7 aa, Homo sapiens
IDSLQAR

SEQ ID NO: 1756 - protein, 8 aa, Homo sapiens
IQEELNSR

SEQ ID NO: 1757 - protein, 11 aa, Homo sapiens
ITGQLESLESR

SEQ ID NO: 1758 - protein, 9 aa, Homo sapiens
LDNFLGEVR

SEQ ID NO: 1759 - protein, 18 aa, Homo sapiens
LETVALPLQGLEDLAADR

SEQ ID NO: 1760 - protein, 8 aa, Homo sapiens
LMALGPIR

SEQ ID NO: 1761 - protein, 19 aa, Homo sapiens
LQAALASTQQFQQMFDELR

SEQ ID NO: 1762 - protein, 9 aa, Homo sapiens
LQDELVTLR

SEQ ID NO: 1763 - protein, 22 aa, Homo sapiens
LSQEEVVLADLSALEAHWSTLR

SEQ ID NO: 1764 - protein, 11 aa, Homo sapiens
LVLDTVNEVSR

SEQ ID NO: 1765 - protein, 16 aa, Homo sapiens
MLSSSDAITQEFMDLR

SEQ ID NO: 1766 - protein, 12 aa, Homo sapiens
NDECVLEDNSQR

SEQ ID NO: 1767 - protein, 14 aa, Homo sapiens
NLQAHYEDFLQDSR

SEQ ID NO: 1768 - protein, 15 aa, Homo sapiens
QSELESIQEVLGDYR

SEQ ID NO: 1769 - protein, 8 aa, Homo sapiens
RGEELIGR

SEQ ID NO: 1770 - protein, 9 aa, Homo sapiens
SLISWNYLR

SEQ ID NO: 1771 - protein, 13 aa, Homo sapiens
SMENEDKEETVAK

SEQ ID NO: 1772 - protein, 18 aa, Homo sapiens
TESLIQQYEAISLLNSER

SEQ ID NO: 1773 - protein, 10 aa, Homo sapiens
VDEIDAAIQR

SEQ ID NO: 1774 - protein, 9 aa, Homo sapiens
VDSLIPWIK

SEQ ID NO: 1775 - protein, 14 aa, Homo sapiens
VTLDPVQLESSLLR

SEQ ID NO: 1776 - protein, 10 aa, Homo sapiens
LVCDLITSTK

SEQ ID NO: 1777 - protein, 25 aa, Homo sapiens
YCLVAVPHGNDIASLFELDPTTLQK

SEQ ID NO: 1778 - protein, 13 aa, Homo sapiens
LFTTTEQDEQGSK

SEQ ID NO: 1779 - protein, 25 aa, Homo sapiens
TLLGIIDCVQGPPAMLQAYEDPGGK

SEQ ID NO: 1780 - protein, 26 aa, Homo sapiens
VILNPVNAGQPLHASNYELSDNAGCK

SEQ ID NO: 1781 - protein, 11 aa, Homo sapiens
FLQLLCENHNR

SEQ ID NO: 1782 - protein, 24 aa, Homo sapiens
GDLPDPIGTGLDPDWSAIAATQCR

SEQ ID NO: 1783 - protein, 11 aa, Homo sapiens
LQDIITALEER

SEQ ID NO: 1784 - protein, 10 aa, Homo sapiens
MLLQNYLQNR

SEQ ID NO: 1785 - protein, 11 aa, Homo sapiens
TEVETFVSLVR

SEQ ID NO: 1786 - protein, 18 aa, Homo sapiens
VQSSEMGTSVLIMQPILR

SEQ ID NO: 1787 - protein, 16 aa, Homo sapiens
DVDSEISDLENEVENK

SEQ ID NO: 1788 - protein, 27 aa, Homo sapiens
INQLSELADPLKDELNLADSEVDNQKR

SEQ ID NO: 1789 - protein, 19 aa, Homo sapiens
QLLAEESLPTTPFYFILGK

SEQ ID NO: 1790 - protein, 19 aa, Homo sapiens
VQDTSNTGLGEDIIHQLSK

SEQ ID NO: 1791 - protein, 11 aa, Homo sapiens
LWDYIDGILIK

SEQ ID NO: 1792 - protein, 16 aa, Homo sapiens
AAFGCFGNWLATVEQR

SEQ ID NO: 1793 - protein, 16 aa, Homo sapiens
DVPESFTSEAYQWLNR

SEQ ID NO: 1794 - protein, 11 aa, Homo sapiens
SIFTGLMIDPR

SEQ ID NO: 1795 - protein, 15 aa, Homo sapiens
FEGGSSLSNYSDLKK

SEQ ID NO: 1796 - protein, 17 aa, Homo sapiens
AQATIPLLGYVVDEMPR

SEQ ID NO: 1797 - protein, 10 aa, Homo sapiens
IANELLLTER

SEQ ID NO: 1798 - protein, 9 aa, Homo sapiens
MQEWETTPR

SEQ ID NO: 1799 - protein, 13 aa, Homo sapiens
TPGIGPVLPLEER

SEQ ID NO: 1800 - protein, 13 aa, Homo sapiens
LMIETDAPWCGVK

SEQ ID NO: 1801 - protein, 13 aa, Homo sapiens
CVGGVVHSFDGTK

SEQ ID NO: 1802 - protein, 11 aa, Homo sapiens
NSHAEFLDIMK

SEQ ID NO: 1803 - protein, 11 aa, Homo sapiens
HQDDLQDVIGR

SEQ ID NO: 1804 - protein, 11 aa, Homo sapiens
LQYAVPIINQK

SEQ ID NO: 1805 - protein, 34 aa, Homo sapiens
GIAPAPALSVSPQNNHSPDPGLSNLAASYLNPVK

SEQ ID NO: 1806 - protein, 12 aa, Homo sapiens
VILNPVNTNLSK

SEQ ID NO: 1807 - protein, 12 aa, Homo sapiens
GSLLSEPAIQVR

SEQ ID NO: 1808 - protein, 26 aa, Homo sapiens
SSIPGCGVTFEIVSNIPEDAQGVEER

SEQ ID NO: 1809 - protein, 22 aa, Homo sapiens
TAMVATVSPAADNYDETLSTLR

SEQ ID NO: 1810 - protein, 13 aa, Homo sapiens
TVAATNMNEESSR

SEQ ID NO: 1811 - protein, 12 aa, Homo sapiens
SVYDDQPNAHKK

SEQ ID NO: 1812 - protein, 15 aa, Homo sapiens
AENSESLGTVPEHER

SEQ ID NO: 1813 - protein, 11 aa, Homo sapiens
TLSSCLLNLIR

SEQ ID NO: 1814 - protein, 9 aa, Homo sapiens
VQVTDTNRR

SEQ ID NO: 1815 - protein, 10 aa, Homo sapiens
IGDLGLATLK

SEQ ID NO: 1816 - protein, 13 aa, Homo sapiens
SQQQDDIEELETK

SEQ ID NO: 1817 - protein, 14 aa, Homo sapiens
CDNIFITGPTGSVK

SEQ ID NO: 1818 - protein, 8 aa, Homo sapiens
GLQFLHTR

SEQ ID NO: 1819 - protein, 16 aa, Homo sapiens
STSSETDCNDNVPSHK

SEQ ID NO: 1820 - protein, 10 aa, Homo sapiens
SPVETCSIPR

SEQ ID NO: 1821 - protein, 10 aa, Homo sapiens
WSAAFHNFIK

SEQ ID NO: 1822 - protein, 8 aa, Homo sapiens
DHYDLLQR

SEQ ID NO: 1823 - protein, 13 aa, Homo sapiens
GANILINDAGEVR

SEQ ID NO: 1824 - protein, 20 aa, Homo sapiens
GPSIGDIEDEEPELPPAIPR

SEQ ID NO: 1825 - protein, 14 aa, Homo sapiens
MLSHQLVSQPGLNR

SEQ ID NO: 1826 - protein, 14 aa, Homo sapiens
NDQEATLEMLFPSR

SEQ ID NO: 1827 - protein, 8 aa, Homo sapiens
ICNQEIVK

SEQ ID NO: 1828 - protein, 9 aa, Homo sapiens
AAPQDVHVR

SEQ ID NO: 1829 - protein, 11 aa, Homo sapiens
AELLQGGDLLR

SEQ ID NO: 1830 - protein, 7 aa, Homo sapiens
ALIQDIR

SEQ ID NO: 1831 - protein, 21 aa, Homo sapiens
MMAQQVQQSEEAMQSLVTSSR

SEQ ID NO: 1832 - protein, 9 aa, Homo sapiens
EIQMAVLLK

SEQ ID NO: 1833 - protein, 9 aa, Homo sapiens
YLLTPSMQK

SEQ ID NO: 1834 - protein, 9 aa, Homo sapiens
TLYDESCSK

SEQ ID NO: 1835 - protein, 8 aa, Homo sapiens
KLVALQLR

SEQ ID NO: 1836 - protein, 9 aa, Homo sapiens
SLNWEEMEK

SEQ ID NO: 1837 - protein, 13 aa, Homo sapiens
CIPEIDDSEFCIR

SEQ ID NO: 1838 - protein, 12 aa, Homo sapiens
LLFGSGLPPALF

SEQ ID NO: 1839 - protein, 7 aa, Homo sapiens
LVALQLR

SEQ ID NO: 1840 - protein, 12 aa, Homo sapiens
VIVLSSSHSYQR

SEQ ID NO: 1841 - protein, 8 aa, Homo sapiens
DLLQNLLK

SEQ ID NO: 1842 - protein, 10 aa, Homo sapiens
LHDVLHSDKK

SEQ ID NO: 1843 - protein, 15 aa, Homo sapiens
LLGTPTEEQWPSMTK

SEQ ID NO: 1844 - protein, 11 aa, Homo sapiens
DLKPQNLLINR

SEQ ID NO: 1845 - protein, 11 aa, Homo sapiens
IGEGTYGTVFK

SEQ ID NO: 1846 - protein, 22 aa, Homo sapiens
LPDYKPYPMYPATTSLVNVVPK

SEQ ID NO: 1847 - protein, 14 aa, Homo sapiens
PLFPGNDVDDQLKR

SEQ ID NO: 1848 - protein, 8 aa, Homo sapiens
SFLFQLLK

SEQ ID NO: 1849 - protein, 7 aa, Homo sapiens
AFGIPVR

SEQ ID NO: 1850 - protein, 14 aa, Homo sapiens
LDDDDEGVPSSALR

SEQ ID NO: 1851 - protein, 16 aa, Homo sapiens
VRLDDDDEGVPSSALR

SEQ ID NO: 1852 - protein, 13 aa, Homo sapiens
AQEAEAGVLGNEK

SEQ ID NO: 1853 - protein, 15 aa, Homo sapiens
LLEPADMVLLSVPDK

SEQ ID NO: 1854 - protein, 17 aa, Homo sapiens
DSGVPGLEADTTGIQVK

SEQ ID NO: 1855 - protein, 15 aa, Homo sapiens
AEISGVQGSETQVLR

SEQ ID NO: 1856 - protein, 18 aa, Homo sapiens
AGEAEESSAVCQVDAEQR

SEQ ID NO: 1857 - protein, 12 aa, Homo sapiens
GPEATGVMPEAR

SEQ ID NO: 1858 - protein, 10 aa, Homo sapiens
ILGTQEITAR

SEQ ID NO: 1859 - protein, 9 aa, Homo sapiens
ITNFTTSWR

SEQ ID NO: 1860 - protein, 7 aa, Homo sapiens
RFELLSR

SEQ ID NO: 1861 - protein, 20 aa, Homo sapiens
VGSAQPSPPDDLDAGGLAQR

SEQ ID NO: 1862 - protein, 15 aa, Homo sapiens
GAVDAAVPTNIIAAK

SEQ ID NO: 1863 - protein, 20 aa, Homo sapiens
QLENLEQQKYDDEDISEDIK

SEQ ID NO: 1864 - protein, 8 aa, Homo sapiens
LEWSPVHK

SEQ ID NO: 1865 - protein, 11 aa, Homo sapiens
LMVHNWEYLGK

SEQ ID NO: 1866 - protein, 19 aa, Homo sapiens
LGESVQDLSSFDEYSSELK

SEQ ID NO: 1867 - protein, 7 aa, Homo sapiens
IILAAFR

SEQ ID NO: 1868 - protein, 23 aa, Homo sapiens
LLEVSDDPQVLAVAAHDVGEYVR

SEQ ID NO: 1869 - protein, 13 aa, Homo sapiens
NTAWPYFLPMLNR

SEQ ID NO: 1870 - protein, 11 aa, Homo sapiens
QDPFTVHMAAR

SEQ ID NO: 1871 - protein, 13 aa, Homo sapiens
QLQSEQPQTAAAR

SEQ ID NO: 1872 - protein, 9 aa, Homo sapiens
VSIFFDYAR

SEQ ID NO: 1873 - protein, 16 aa, Homo sapiens
YNIIPVLSDILQESVK

SEQ ID NO: 1874 - protein, 8 aa, Homo sapiens
SIYHYGNK

SEQ ID NO: 1875 - protein, 7 aa, Homo sapiens
HMQTFYR

SEQ ID NO: 1876 - protein, 20 aa, Homo sapiens
ILPGSMIVSSDDTVDSTIDR

SEQ ID NO: 1877 - protein, 10 aa, Homo sapiens
LSDEHEPEQR

SEQ ID NO: 1878 - protein, 10 aa, Homo sapiens
LQLLLLNPLK

SEQ ID NO: 1879 - protein, 27 aa, Homo sapiens
DSDKPETPPVVNVPVPVLIGPISGMSR

SEQ ID NO: 1880 - protein, 12 aa, Homo sapiens
EWGAEALTSLIK

SEQ ID NO: 1881 - protein, 14 aa, Homo sapiens
IGSESTKPPITFDK

SEQ ID NO: 1882 - protein, 23 aa, Homo sapiens
GSLPPHYALTVLNTTTAATLSNK

SEQ ID NO: 1883 - protein, 9 aa, Homo sapiens
AVAVESIHR

SEQ ID NO: 1884 - protein, 13 aa, Homo sapiens
DNITNNTAAATVR

SEQ ID NO: 1885 - protein, 9 aa, Homo sapiens
FCVQPQLLR

SEQ ID NO: 1886 - protein, 14 aa, Homo sapiens
IESGGGNILIHHSR

SEQ ID NO: 1887 - protein, 10 aa, Homo sapiens
LLENMQSDLR

SEQ ID NO: 1888 - protein, 11 aa, Homo sapiens
LLETGLVNMHR

SEQ ID NO: 1889 - protein, 13 aa, Homo sapiens
SFQEILQIVSPVR

SEQ ID NO: 1890 - protein, 10 aa, Homo sapiens
VLSIGLPVAR

SEQ ID NO: 1891 - protein, 11 aa, Homo sapiens
YLLQPLGDFSR

SEQ ID NO: 1892 - protein, 17 aa, Homo sapiens
YNQAEWVALNYVPFAER

SEQ ID NO: 1893 - protein, 22 aa, Homo sapiens
NADMSEDMQQDAVDCATQAMEK

SEQ ID NO: 1894 - protein, 8 aa, Homo sapiens
DIAAYIKK

SEQ ID NO: 1895 - protein, 7 aa, Homo sapiens
DIAAYIK

SEQ ID NO: 1896 - protein, 12 aa, Homo sapiens
TIADSLINSFLK

SEQ ID NO: 1897 - protein, 14 aa, Homo sapiens
ILSFIQDQEEDYLK

SEQ ID NO: 1898 - protein, 9 aa, Homo sapiens
VAFVDMLLK

SEQ ID NO: 1899 - protein, 10 aa, Homo sapiens
FASVLPEYLK

SEQ ID NO: 1900 - protein, 16 aa, Homo sapiens
TDSDEEVAMLLDTVQK

SEQ ID NO: 1901 - protein, 15 aa, Homo sapiens
ADLESLLQTPGGKPR

SEQ ID NO: 1902 - protein, 14 aa, Homo sapiens
DTSYLFITGPDVVK

SEQ ID NO: 1903 - protein, 15 aa, Homo sapiens
AYNMVDIIHSVVDER

SEQ ID NO: 1904 - protein, 10 aa, Homo sapiens
FANPFPAAVR

SEQ ID NO: 1905 - protein, 13 aa, Homo sapiens
GFVDDIIQPSSTR

SEQ ID NO: 1906 - protein, 11 aa, Homo sapiens
THTTMSGVAHR

SEQ ID NO: 1907 - protein, 10 aa, Homo sapiens
ALQVLVDQSK

SEQ ID NO: 1908 - protein, 11 aa, Homo sapiens
LLQIIDTTLLK

SEQ ID NO: 1909 - protein, 13 aa, Homo sapiens
QLEPLVAPLADGK

SEQ ID NO: 1910 - protein, 11 aa, Homo sapiens
IQQIHVVSQFK

SEQ ID NO: 1911 - protein, 21 aa, Homo sapiens
LGTDPTHVMGLYPDLLPTDYR

SEQ ID NO: 1912 - protein, 14 aa, Homo sapiens
LICDFPFDGLLEER

SEQ ID NO: 1913 - protein, 16 aa, Homo sapiens
TPVPAGEEEGELGEYR

SEQ ID NO: 1914 - protein, 15 aa, Homo sapiens
VLLGQDEPLIHVFAK

SEQ ID NO: 1915 - protein, 24 aa, Homo sapiens
MGTLVSLEPSSVASDVSKPVLTTK

SEQ ID NO: 1916 - protein, 13 aa, Homo sapiens
NLVAFVSQEAGNR

SEQ ID NO: 1917 - protein, 18 aa, Homo sapiens
VLTSGCDSSALEGLPLIK

SEQ ID NO: 1918 - protein, 9 aa, Homo sapiens
GGDFLYSDR

SEQ ID NO: 1919 - protein, 12 aa, Homo sapiens
IVVMPGGGITDR

SEQ ID NO: 1920 - protein, 14 aa, Homo sapiens
FEINCIPNLIEYVK

SEQ ID NO: 1921 - protein, 13 aa, Homo sapiens
ELVPLLYFSCPYK

SEQ ID NO: 1922 - protein, 15 aa, Homo sapiens
AVDSAMELLFLDTFK

SEQ ID NO: 1923 - protein, 14 aa, Homo sapiens
DTGELASSFLEFMR

SEQ ID NO: 1924 - protein, 9 aa, Homo sapiens
LTELLDLYR

SEQ ID NO: 1925 - protein, 18 aa, Homo sapiens
AQIMGFMPVTYKDPAYLK

SEQ ID NO: 1926 - protein, 16 aa, Homo sapiens
EDSAYGSQSVEQEAEK

SEQ ID NO: 1927 - protein, 19 aa, Homo sapiens
EPAPETADGPYLVIVEQPK

SEQ ID NO: 1928 - protein, 22 aa, Homo sapiens
ASDGSFSLPLKPVISQPIHDSK

SEQ ID NO: 1929 - protein, 12 aa, Homo sapiens
ALLDYGVTADAR

SEQ ID NO: 1930 - protein, 14 aa, Homo sapiens
DSGEEAAEPSAPSR

SEQ ID NO: 1931 - protein, 12 aa, Homo sapiens
SRPQGLTEAEQR

SEQ ID NO: 1932 - protein, 21 aa, Homo sapiens
TFAGNTPLHLAAGLGYPTLTR

SEQ ID NO: 1933 - protein, 14 aa, Homo sapiens
TPQCEPQAPEMLQR

SEQ ID NO: 1934 - protein, 12 aa, Homo sapiens
RAQEILSQLPIK

SEQ ID NO: 1935 - protein, 11 aa, Homo sapiens
AQEILSQLPIK

SEQ ID NO: 1936 - protein, 13 aa, Homo sapiens
VVVFIKPTCPYCR

SEQ ID NO: 1937 - protein, 8 aa, Homo sapiens
AQEFVNCK

SEQ ID NO: 1938 - protein, 21 aa, Homo sapiens
DCIGGCSDLVSLQQSGELLTR

SEQ ID NO: 1939 - protein, 29 aa, Homo sapiens
QGLLEFVDITATNHTNEIQDYLQQLTGAR

SEQ ID NO: 1940 - protein, 11 aa, Homo sapiens
GKPLVVVINEK

SEQ ID NO: 1941 - protein, 19 aa, Homo sapiens
ADLVISHAGAGSCLETLEK

SEQ ID NO: 1942 - protein, 7 aa, Homo sapiens
FSAFLDK

SEQ ID NO: 1943 - protein, 19 aa, Homo sapiens
GTVVPEPFSTESFTLDVYR

SEQ ID NO: 1944 - protein, 8 aa, Homo sapiens
IESLGYNR

SEQ ID NO: 1945 - protein, 10 aa, Homo sapiens
ESALTLACYK

SEQ ID NO: 1946 - protein, 12 aa, Homo sapiens
LEALLEAAGIGK

SEQ ID NO: 1947 - protein, 31 aa, Homo sapiens
SSSLQVADQDLLPSFHPYQPLECIVEETEGK

SEQ ID NO: 1948 - protein, 15 aa, Homo sapiens
MKAENSHNAGQVDTR

SEQ ID NO: 1949 - protein, 29 aa, Homo sapiens
GVFPEGEGDGSLPEDHFSELPQVDTILFK

SEQ ID NO: 1950 - protein, 19 aa, Homo sapiens
GDITPLMAASSGGYLDIVK

SEQ ID NO: 1951 - protein, 21 aa, Homo sapiens
NVSDYTPLSLAASGGYVNIIK

SEQ ID NO: 1952 - protein, 10 aa, Homo sapiens
AEVVSLLLDR

SEQ ID NO: 1953 - protein, 13 aa, Homo sapiens
GADVNAPPVPSSR

SEQ ID NO: 1954 - protein, 20 aa, Homo sapiens
GANLEEVNDEGYTPLMEAAR

SEQ ID NO: 1955 - protein, 18 aa, Homo sapiens
LTSSVSCALDEAAAALTR

SEQ ID NO: 1956 - protein, 10 aa, Homo sapiens
QEVVDLLLAR

SEQ ID NO: 1957 - protein, 12 aa, Homo sapiens
EVGNALLNVVLK

SEQ ID NO: 1958 - protein, 18 aa, Homo sapiens
GLLPYDKDLFEPQTALLR

SEQ ID NO: 1959 - protein, 11 aa, Homo sapiens
FLTEVLLPIVK

SEQ ID NO: 1960 - protein, 9 aa, Homo sapiens
LFDLLYPEK

SEQ ID NO: 1961 - protein, 9 aa, Homo sapiens
FLELLPVSK

SEQ ID NO: 1962 - protein, 22 aa, Homo sapiens
IVSVISSPSLTSETEWVGYPFR

SEQ ID NO: 1963 - protein, 11 aa, Homo sapiens
LHHEFLQQSLR

SEQ ID NO: 1964 - protein, 16 aa, Homo sapiens
LITALGSSEVQPQFTR

SEQ ID NO: 1965 - protein, 14 aa, Homo sapiens
METQLQSIFEEVVK

SEQ ID NO: 1966 - protein, 14 aa, Homo sapiens
MLLETDHINQIGYR

SEQ ID NO: 1967 - protein, 15 aa, Homo sapiens
NACLLPAYFAVTEIR

SEQ ID NO: 1968 - protein, 11 aa, Homo sapiens
NALADFLPVMK

SEQ ID NO: 1969 - protein, 9 aa, Homo sapiens
QNNVPQESR

SEQ ID NO: 1970 - protein, 12 aa, Homo sapiens
TVLSAESEELNR

SEQ ID NO: 1971 - protein, 12 aa, Homo sapiens
DGQLWLCAPQAK

SEQ ID NO: 1972 - protein, 8 aa, Homo sapiens
NVHDLLAK

SEQ ID NO: 1973 - protein, 26 aa, Homo sapiens
MDDDEEMKNQCFGGEYMGEVFDHMMK

SEQ ID NO: 1974 - protein, 17 aa, Homo sapiens
AQENYEGSEEVSPPQTK

SEQ ID NO: 1975 - protein, 19 aa, Homo sapiens
TGETGIEETILEGHLGVTK

SEQ ID NO: 1976 - protein, 17 aa, Homo sapiens
ALTLQDLDNIWAAQAGK

SEQ ID NO: 1977 - protein, 11 aa, Homo sapiens
DHEDYDPQTVR

SEQ ID NO: 1978 - protein, 18 aa, Homo sapiens
EICSLFGEAPQNLSQTQR

SEQ ID NO: 1979 - protein, 19 aa, Homo sapiens
ELIDDFIFPASNVYLQYMR

SEQ ID NO: 1980 - protein, 9 aa, Homo sapiens
FNDYFEFPR

SEQ ID NO: 1981 - protein, 14 aa, Homo sapiens
HGNPEEEEWLTAER

SEQ ID NO: 1982 - protein, 10 aa, Homo sapiens
HSGDYFTLLR

SEQ ID NO: 1983 - protein, 7 aa, Homo sapiens
LQYYVPR

SEQ ID NO: 1984 - protein, 9 aa, Homo sapiens
LWGEPVNLR

SEQ ID NO: 1985 - protein, 12 aa, Homo sapiens
MDTIDQDDELIR

SEQ ID NO: 1986 - protein, 12 aa, Homo sapiens
NNFLPNADMETR

SEQ ID NO: 1987 - protein, 19 aa, Homo sapiens
QVDDLEVWSHTNDTIGSVR

SEQ ID NO: 1988 - protein, 13 aa, Homo sapiens
SGGLPLVLSMLTR

SEQ ID NO: 1989 - protein, 11 aa, Homo sapiens
VISSVSYYTHR

SEQ ID NO: 1990 - protein, 12 aa, Homo sapiens
VVIQSNDDIASR

SEQ ID NO: 1991 - protein, 10 aa, Homo sapiens
YSHVQEVQER

SEQ ID NO: 1992 - protein, 16 aa, Homo sapiens
NTGSGLLGMANIDLEK

SEQ ID NO: 1993 - protein, 11 aa, Homo sapiens
INSEPLKDEFK

SEQ ID NO: 1994 - protein, 13 aa, Homo sapiens
SLPAALSATEIEK

SEQ ID NO: 1995 - protein, 16 aa, Homo sapiens
GLEYTVEECTCEDCIK

SEQ ID NO: 1996 - protein, 23 aa, Homo sapiens
VDSDHCFPLPAMEEGATILVTTK

SEQ ID NO: 1997 - protein, 16 aa, Homo sapiens
LGIWGGNVALDNLQIK

SEQ ID NO: 1998 - protein, 17 aa, Homo sapiens
FSLVPMEHYSLPPVIDK

SEQ ID NO: 1999 - protein, 14 aa, Homo sapiens
MVLSVFSPYWLINK

SEQ ID NO: 2000 - protein, 18 aa, Homo sapiens
LFTAIGYSESTHNLTLPK

SEQ ID NO: 2001 - protein, 21 aa, Homo sapiens
KVDVSSVPDHLKEQEDWTDSK

SEQ ID NO: 2002 - protein, 14 aa, Homo sapiens
GLAAITMDKEYQQK

SEQ ID NO: 2003 - protein, 13 aa, Homo sapiens
VLLFTDDVALVSK

SEQ ID NO: 2004 - protein, 15 aa, Homo sapiens
SIGATLTDVDDLIFK

SEQ ID NO: 2005 - protein, 21 aa, Homo sapiens
QQDIVPSLVASIGDTTSSLLK

SEQ ID NO: 2006 - protein, 12 aa, Homo sapiens
ISGEIMELVLVK

SEQ ID NO: 2007 - protein, 9 aa, Homo sapiens
NLAASWYHK

SEQ ID NO: 2008 - protein, 13 aa, Homo sapiens
QVSSIPIISGGTK

SEQ ID NO: 2009 - protein, 12 aa, Homo sapiens
TTNSSLEEIMDK

SEQ ID NO: 2010 - protein, 18 aa, Homo sapiens
LKPMQVALSEDDLTVLMK

SEQ ID NO: 2011 - protein, 12 aa, Homo sapiens
ENALSELDVPFK

SEQ ID NO: 2012 - protein, 12 aa, Homo sapiens
LYMNPYAESELK

SEQ ID NO: 2013 - protein, 16 aa, Homo sapiens
ITAELNAFNVFVCDQK

SEQ ID NO: 2014 - protein, 19 aa, Homo sapiens
GEPLHIINSSNVTDEPLLK

SEQ ID NO: 2015 - protein, 16 aa, Homo sapiens
AMITDPEVVFVASLTK

SEQ ID NO: 2016 - protein, 17 aa, Homo sapiens
LDNNFEVNFDKDPMEMR

SEQ ID NO: 2017 - protein, 11 aa, Homo sapiens
DDSVRPNMTLK

SEQ ID NO: 2018 - protein, 30 aa, Homo sapiens
IKFETNPEDSPADQTLIVQSQPVEVIYDAK

SEQ ID NO: 2019 - protein, 16 aa, Homo sapiens
CQLFIQPAGILEHQYK

SEQ ID NO: 2020 - protein, 15 aa, Homo sapiens
AAEVPNEELINLLLK

SEQ ID NO: 2021 - protein, 20 aa, Homo sapiens
FNLDLYPDATEGDLYTDMSK

SEQ ID NO: 2022 - protein, 13 aa, Homo sapiens
IVTLTPFCTIANK

SEQ ID NO: 2023 - protein, 11 aa, Homo sapiens
SCLNVFNNLAK

SEQ ID NO: 2024 - protein, 9 aa, Homo sapiens
MNIELTQLK

SEQ ID NO: 2025 - protein, 18 aa, Homo sapiens
GVVGGVTGIITKPVEGAK

SEQ ID NO: 2026 - protein, 15 aa, Homo sapiens
VVGCEGSSKPFFYNR

SEQ ID NO: 2027 - protein, 20 aa, Homo sapiens
IQIIGLGTQVSQRPGAQALK

SEQ ID NO: 2028 - protein, 13 aa, Homo sapiens
TVNAVVEFFQSNK

SEQ ID NO: 2029 - protein, 12 aa, Homo sapiens
LENIIVTDVDPK

SEQ ID NO: 2030 - protein, 15 aa, Homo sapiens
ILTENLCEGTEDLDK

SEQ ID NO: 2031 - protein, 20 aa, Homo sapiens
FQLTLYPDATEGEAYADMSK

SEQ ID NO: 2032 - protein, 12 aa, Homo sapiens
ISLDYHEIEGSK

SEQ ID NO: 2033 - protein, 7 aa, Homo sapiens
KQSLFAR

SEQ ID NO: 2034 - protein, 7 aa, Homo sapiens
VPVVEIK

SEQ ID NO: 2035 - protein, 11 aa, Homo sapiens
QIILLEQSYQK

SEQ ID NO: 2036 - protein, 11 aa, Homo sapiens
FLGDYVENLNK

SEQ ID NO: 2037 - protein, 12 aa, Homo sapiens
ACNAIEDAQSTR

SEQ ID NO: 2038 - protein, 24 aa, Homo sapiens
APVIIIPQSSVSPNAVIADLGLIR

SEQ ID NO: 2039 - protein, 11 aa, Homo sapiens
AVSILGDEVFR

SEQ ID NO: 2040 - protein, 11 aa, Homo sapiens
AVSIMGNEVFR

SEQ ID NO: 2041 - protein, 8 aa, Homo sapiens
DFGDSLAR

SEQ ID NO: 2042 - protein, 9 aa, Homo sapiens
DQLIWSVVR

SEQ ID NO: 2043 - protein, 8 aa, Homo sapiens
DSDIIDFR

SEQ ID NO: 2044 - protein, 13 aa, Homo sapiens
ESLSAATAQAAER

SEQ ID NO: 2045 - protein, 7 aa, Homo sapiens
ETQILPR

SEQ ID NO: 2046 - protein, 20 aa, Homo sapiens
GHLDSMNVSLNQEDLNLLFR

SEQ ID NO: 2047 - protein, 24 aa, Homo sapiens
ILLENLGEASSQPSPTQSVQETVR

SEQ ID NO: 2048 - protein, 13 aa, Homo sapiens
IQGLDSSLSLQSR

SEQ ID NO: 2049 - protein, 11 aa, Homo sapiens
LFAWADPTGTR

SEQ ID NO: 2050 - protein, 8 aa, Homo sapiens
LLRPQLPS

SEQ ID NO: 2051 - protein, 8 aa, Homo sapiens
MSSFNLSR

SEQ ID NO: 2052 - protein, 8 aa, Homo sapiens
NVQLLFAR

SEQ ID NO: 2053 - protein, 18 aa, Homo sapiens
PTGGIVDMASSTFQGIQR

SEQ ID NO: 2054 - protein, 25 aa, Homo sapiens
QESSFFTLTIVPHGYTEVANIPVAR

SEQ ID NO: 2055 - protein, 13 aa, Homo sapiens
QSGSPEEMVLLPR

SEQ ID NO: 2056 - protein, 16 aa, Homo sapiens
SLFGHTVGGAAGVVSR

SEQ ID NO: 2057 - protein, 21 aa, Homo sapiens
VHNQFSLVSDEDYLNPPVIDR

SEQ ID NO: 2058 - protein, 8 aa, Homo sapiens
VLACPFLR

SEQ ID NO: 2059 - protein, 12 aa, Homo sapiens
VLESVVADLLNR

SEQ ID NO: 2060 - protein, 24 aa, Homo sapiens
YLLEGTAETHELAEGSTADVLHSR

SEQ ID NO: 2061 - protein, 27 aa, Homo sapiens
RPPPPPVPLLPPGTSPPVDPFTTLASK

SEQ ID NO: 2062 - protein, 12 aa, Homo sapiens
VLDAYGLLGVLR

SEQ ID NO: 2063 - protein, 12 aa, Homo sapiens
HSAQTEEPVQAK

SEQ ID NO: 2064 - protein, 13 aa, Homo sapiens
LMQDLDNNSITVK

SEQ ID NO: 2065 - protein, 17 aa, Homo sapiens
TPWLYEQEGEVEKPFIK

SEQ ID NO: 2066 - protein, 11 aa, Homo sapiens
KLPEEEVESSR

SEQ ID NO: 2067 - protein, 7 aa, Homo sapiens
LIDIQEK

SEQ ID NO: 2068 - protein, 11 aa, Homo sapiens
ALYALQDIVSR

SEQ ID NO: 2069 - protein, 13 aa, Homo sapiens
DQHLNNSSSSPQR

SEQ ID NO: 2070 - protein, 18 aa, Homo sapiens
ESPPTVDSTQQPNPLPLR

SEQ ID NO: 2071 - protein, 8 aa, Homo sapiens
IDTQQLDR

SEQ ID NO: 2072 - protein, 9 aa, Homo sapiens
LLGELHTLR

SEQ ID NO: 2073 - protein, 9 aa, Homo sapiens
MLQQQEQLR

SEQ ID NO: 2074 - protein, 11 aa, Homo sapiens
QLEALMAEHQR

SEQ ID NO: 2075 - protein, 12 aa, Homo sapiens
QLGSILQDSLAK

SEQ ID NO: 2076 - protein, 16 aa, Homo sapiens
SSQQPVSEVSTIPCPR

SEQ ID NO: 2077 - protein, 13 aa, Homo sapiens
MEDETQKELETLR

SEQ ID NO: 2078 - protein, 15 aa, Homo sapiens
LLLQQLEATLETGKR

SEQ ID NO: 2079 - protein, 17 aa, Homo sapiens
VQSSYLHSLLEMGELLK

SEQ ID NO: 2080 - protein, 11 aa, Homo sapiens
MAIQQADKLLK

SEQ ID NO: 2081 - protein, 13 aa, Homo sapiens
DIQYPFLGPVPTR

SEQ ID NO: 2082 - protein, 8 aa, Homo sapiens
IPEFIAFR

SEQ ID NO: 2083 - protein, 11 aa, Homo sapiens
LNNSLHFAQVR

SEQ ID NO: 2084 - protein, 11 aa, Homo sapiens
LSLEEETLWLR

SEQ ID NO: 2085 - protein, 17 aa, Homo sapiens
SMNLRPEEDDIPWEDLR

SEQ ID NO: 2086 - protein, 9 aa, Homo sapiens
YQEALDVIR

SEQ ID NO: 2087 - protein, 12 aa, Homo sapiens
DNPGTTTASTAK

SEQ ID NO: 2088 - protein, 8 aa, Homo sapiens
APVWWPMK

SEQ ID NO: 2089 - protein, 7 aa, Homo sapiens
KDEAGER

SEQ ID NO: 2090 - protein, 13 aa, Homo sapiens
KKQEAEENEITEK

SEQ ID NO: 2091 - protein, 9 aa, Homo sapiens
YVTVYNLIK

SEQ ID NO: 2092 - protein, 17 aa, Homo sapiens
MGPLNISTPVEPVAASK

SEQ ID NO: 2093 - protein, 10 aa, Homo sapiens
FLDPITGTFR

SEQ ID NO: 2094 - protein, 15 aa, Homo sapiens
NLDNAVLIGETGSGK

SEQ ID NO: 2095 - protein, 15 aa, Homo sapiens
TTQIPQYLYEGGISR

SEQ ID NO: 2096 - protein, 8 aa, Homo sapiens
WFWSIVEK

SEQ ID NO: 2097 - protein, 14 aa, Homo sapiens
YNHLVYSQIPAAVK

SEQ ID NO: 2098 - protein, 10 aa, Homo sapiens
YCIFDLATGK

SEQ ID NO: 2099 - protein, 16 aa, Homo sapiens
LTYQDAVNLQNYVEEK

SEQ ID NO: 2100 - protein, 15 aa, Homo sapiens
SFYTAIAQAFLSNEK

SEQ ID NO: 2101 - protein, 21 aa, Homo sapiens
KEDLFGRPSQGLYSSSASSGK

SEQ ID NO: 2102 - protein, 15 aa, Homo sapiens
AMNQQTTLDTPQLER

SEQ ID NO: 2103 - protein, 17 aa, Homo sapiens
CTADILLLDTLLGTLVK

SEQ ID NO: 2104 - protein, 12 aa, Homo sapiens
GDFLNYALSLMR

SEQ ID NO: 2105 - protein, 13 aa, Homo sapiens
LLCDSVVLQPYLR

SEQ ID NO: 2106 - protein, 14 aa, Homo sapiens
LLTATNLVTLPNSR

SEQ ID NO: 2107 - protein, 13 aa, Homo sapiens
MLVVAEQPLHAMR

SEQ ID NO: 2108 - protein, 11 aa, Homo sapiens
NAQNPSLHHPR

SEQ ID NO: 2109 - protein, 20 aa, Homo sapiens
TSIHFVVHPLPGTEDQLNDR

SEQ ID NO: 2110 - protein, 7 aa, Homo sapiens
VPDCFQR

SEQ ID NO: 2111 - protein, 15 aa, Homo sapiens
VTFKDEPGEGSGVAR

SEQ ID NO: 2112 - protein, 11 aa, Homo sapiens
WLDGASFDNER

SEQ ID NO: 2113 - protein, 11 aa, Homo sapiens
LDNTLEEIIFK

SEQ ID NO: 2114 - protein, 16 aa, Homo sapiens
VPIWDQDIQFLPGSQK

SEQ ID NO: 2115 - protein, 13 aa, Homo sapiens
IWDLQGSEEPVFR

SEQ ID NO: 2116 - protein, 14 aa, Homo sapiens
LSGLEQPQGALQTR

SEQ ID NO: 2117 - protein, 11 aa, Homo sapiens
LVTCTGYHQVR

SEQ ID NO: 2118 - protein, 20 aa, Homo sapiens
EFLPTSWSPVGAGPTPSLYK

SEQ ID NO: 2119 - protein, 13 aa, Homo sapiens
AGYSLQELFHLTR

SEQ ID NO: 2120 - protein, 12 aa, Homo sapiens
AADKPADQGAEK

SEQ ID NO: 2121 - protein, 12 aa, Homo sapiens
IILNTAVAEFFK

SEQ ID NO: 2122 - protein, 13 aa, Homo sapiens
LGINLLGGPLGGK

SEQ ID NO: 2123 - protein, 14 aa, Homo sapiens
LGLDSEEDYYTPQK

SEQ ID NO: 2124 - protein, 11 aa, Homo sapiens
VLACGLNEFNK

SEQ ID NO: 2125 - protein, 17 aa, Homo sapiens
AGGGAAEQEELHYIPIR

SEQ ID NO: 2126 - protein, 19 aa, Homo sapiens
LVNACLAEELPHIHAFEQK

SEQ ID NO: 2127 - protein, 13 aa, Homo sapiens
GLLSLLNDFHSGK

SEQ ID NO: 2128 - protein, 21 aa, Homo sapiens
AAATTSQPVLTSQQIETIFFK

SEQ ID NO: 2129 - protein, 16 aa, Homo sapiens
ISQNFLSSINEEITPR

SEQ ID NO: 2130 - protein, 11 aa, Homo sapiens
SAPDRQEEISK

SEQ ID NO: 2131 - protein, 12 aa, Homo sapiens
LQANFFEMDIPK

SEQ ID NO: 2132 - protein, 13 aa, Homo sapiens
SGNIPAGTTVDTK

SEQ ID NO: 2133 - protein, 17 aa, Homo sapiens
KPSIAAVVGSMDAHPNR

SEQ ID NO: 2134 - protein, 16 aa, Homo sapiens
VGDTVLGMATQCVQMK

SEQ ID NO: 2135 - protein, 9 aa, Homo sapiens
QFHTGIEIK

SEQ ID NO: 2136 - protein, 13 aa, Homo sapiens
AIATPVQGVWDMR

SEQ ID NO: 2137 - protein, 20 aa, Homo sapiens
DGVSEGQFQQVLHHELLAIR

SEQ ID NO: 2138 - protein, 19 aa, Homo sapiens
FSSDELQILTYQLCHTYVR

SEQ ID NO: 2139 - protein, 16 aa, Homo sapiens
HTYLPLEVCNIVAGQR

SEQ ID NO: 2140 - protein, 12 aa, Homo sapiens
VLQPPSILYGGR

SEQ ID NO: 2141 - protein, 13 aa, Homo sapiens
YAQGADSVEPMFR

SEQ ID NO: 2142 - protein, 14 aa, Homo sapiens
ELAPEAVLFTYVGK

SEQ ID NO: 2143 - protein, 22 aa, Homo sapiens
LQNPDLDSEALLALPLPQLVQK

SEQ ID NO: 2144 - protein, 17 aa, Homo sapiens
VGYYETDNYTMPSPAMR

SEQ ID NO: 2145 - protein, 14 aa, Homo sapiens
FLEEGNLEEAEIQK

SEQ ID NO: 2146 - protein, 14 aa, Homo sapiens
NALSSALAQNTDLK

SEQ ID NO: 2147 - protein, 9 aa, Homo sapiens
NFVFWQDVR

SEQ ID NO: 2148 - protein, 13 aa, Homo sapiens
VTSCIHNILSGQR

SEQ ID NO: 2149 - protein, 12 aa, Homo sapiens
SVASSQPAKPTK

SEQ ID NO: 2150 - protein, 22 aa, Homo sapiens
LAGGNDVGIFVAGVLEDSPAAK

SEQ ID NO: 2151 - protein, 11 aa, Homo sapiens
EGLEEGDQILR

SEQ ID NO: 2152 - protein, 11 aa, Homo sapiens
VNNVDFTNIIR

SEQ ID NO: 2153 - protein, 12 aa, Homo sapiens
YESSSYTDQFSR

SEQ ID NO: 2154 - protein, 8 aa, Homo sapiens
LTTQAYCK

SEQ ID NO: 2155 - protein, 12 aa, Homo sapiens
VKDASPNQVAEK

SEQ ID NO: 2156 - protein, 9 aa, Homo sapiens
ISASLLDSR

SEQ ID NO: 2157 - protein, 16 aa, Homo sapiens
SYETLVDFDNHLDDIR

SEQ ID NO: 2158 - protein, 22 aa, Homo sapiens
ADVEDGEETCALASHSGSSGSK

SEQ ID NO: 2159 - protein, 12 aa, Homo sapiens
CPLCQQDWVVQR

SEQ ID NO: 2160 - protein, 27 aa, Homo sapiens
GLESQVLDKEEEQPLWAANENSVQMMR

SEQ ID NO: 2161 - protein, 8 aa, Homo sapiens
FVQEEAFR

SEQ ID NO: 2162 - protein, 13 aa, Homo sapiens
SLAILSLAENEIR

SEQ ID NO: 2163 - protein, 17 aa, Homo sapiens
AGCSGLGHPIQLDPNQK

SEQ ID NO: 2164 - protein, 8 aa, Homo sapiens
QFLAQVNK

SEQ ID NO: 2165 - protein, 30 aa, Homo sapiens
SWTDVSLLPAFDAVGQLSSGTKPNPQVYSR

SEQ ID NO: 2166 - protein, 15 aa, Homo sapiens
ASLESWWQNPVPGLR

SEQ ID NO: 2167 - protein, 10 aa, Homo sapiens
DAFSLAEGLR

SEQ ID NO: 2168 - protein, 11 aa, Homo sapiens
QDCFNMAQGFR

SEQ ID NO: 2169 - protein, 9 aa, Homo sapiens
RAEILDEMR

SEQ ID NO: 2170 - protein, 10 aa, Homo sapiens
TVLELVTQYR

SEQ ID NO: 2171 - protein, 8 aa, Homo sapiens
FSDFLLTK

SEQ ID NO: 2172 - protein, 26 aa, Homo sapiens
TVLNVTDEYDLLDDGGDAVFSQLTEK

SEQ ID NO: 2173 - protein, 11 aa, Homo sapiens
APEPPPALIVR

SEQ ID NO: 2174 - protein, 9 aa, Homo sapiens
EMFLEDILR

SEQ ID NO: 2175 - protein, 10 aa, Homo sapiens
IGQTIGYQIR

SEQ ID NO: 2176 - protein, 13 aa, Homo sapiens
LASNALQEPSSFR

SEQ ID NO: 2177 - protein, 13 aa, Homo sapiens
YFGSCPVIYIQGR

SEQ ID NO: 2178 - protein, 15 aa, Homo sapiens
TYSWDNAQVLLVGNK

SEQ ID NO: 2179 - protein, 15 aa, Homo sapiens
PVTIPASQVSTQNLK

SEQ ID NO: 2180 - protein, 11 aa, Homo sapiens
SLASDITDEQK

SEQ ID NO: 2181 - protein, 11 aa, Homo sapiens
VLIVYAHQEPK

SEQ ID NO: 2182 - protein, 27 aa, Homo sapiens
ATDKDITGTLSNPEVFNYGVETHEAYK

SEQ ID NO: 2183 - protein, 18 aa, Homo sapiens
VLAPQISFAPEIASEEER

SEQ ID NO: 2184 - protein, 22 aa, Homo sapiens
VLCQGFAFDIPGFYDSGLLQGK

SEQ ID NO: 2185 - protein, 17 aa, Homo sapiens
VSASSPSLAVASQSDSK

SEQ ID NO: 2186 - protein, 10 aa, Homo sapiens
TLLLLSSVPK

SEQ ID NO: 2187 - protein, 16 aa, Homo sapiens
LLLETLPGYSLSLDPK

SEQ ID NO: 2188 - protein, 11 aa, Homo sapiens
LENIGMEPLEK

SEQ ID NO: 2189 - protein, 14 aa, Homo sapiens
LECWIDPLSMGPQK

SEQ ID NO: 2190 - protein, 8 aa, Homo sapiens
KIQLLEAK

SEQ ID NO: 2191 - protein, 15 aa, Homo sapiens
KPIVPQKEPSPLLEK

SEQ ID NO: 2192 - protein, 9 aa, Homo sapiens
LLHSEAYLK

SEQ ID NO: 2193 - protein, 9 aa, Homo sapiens
AEDNFNLEK

SEQ ID NO: 2194 - protein, 19 aa, Homo sapiens
EAEKSEDSSGAAGLSGLHR

SEQ ID NO: 2195 - protein, 11 aa, Homo sapiens
SYYKPDSPEYK

SEQ ID NO: 2196 - protein, 14 aa, Homo sapiens
YIEGLSAESNSISK

SEQ ID NO: 2197 - protein, 9 aa, Homo sapiens
IILEPMDLK

SEQ ID NO: 2198 - protein, 11 aa, Homo sapiens
VQYPDYYAIIK

SEQ ID NO: 2199 - protein, 23 aa, Homo sapiens
DGAAYFYGPIFIHPEETEHEPTK

SEQ ID NO: 2200 - protein, 28 aa, Homo sapiens
CYSDSLAEIPAVDPNFPNKPPLTFDIIR

SEQ ID NO: 2201 - protein, 10 aa, Homo sapiens
YNVPNSAIYK

SEQ ID NO: 2202 - protein, 8 aa, Homo sapiens
LISELFQK

SEQ ID NO: 2203 - protein, 11 aa, Homo sapiens
SELPDYYLTIK

SEQ ID NO: 2204 - protein, 17 aa, Homo sapiens
NQPDYYEVVSQPIDLMK

SEQ ID NO: 2205 - protein, 15 aa, Homo sapiens
ELGPLPDDDDMASPK

SEQ ID NO: 2206 - protein, 23 aa, Homo sapiens
HYNEEGSQVYNDAHILEKLLKEK

SEQ ID NO: 2207 - protein, 12 aa, Homo sapiens
AAQQQQPSASPR

SEQ ID NO: 2208 - protein, 13 aa, Homo sapiens
AQHPDYSFGELSR

SEQ ID NO: 2209 - protein, 10 aa, Homo sapiens
DEDVFVCESR

SEQ ID NO: 2210 - protein, 8 aa, Homo sapiens
LLCELFIR

SEQ ID NO: 2211 - protein, 8 aa, Homo sapiens
LQQVMQAK

SEQ ID NO: 2212 - protein, 7 aa, Homo sapiens
LWDLYLR

SEQ ID NO: 2213 - protein, 9 aa, Homo sapiens
TPSNLAAAR

SEQ ID NO: 2214 - protein, 10 aa, Homo sapiens
VVDDEIYYFR

SEQ ID NO: 2215 - protein, 16 aa, Homo sapiens
SRPLATGPSSQSHQEK

SEQ ID NO: 2216 - protein, 18 aa, Homo sapiens
AGFIESTFKPNENTEESK

SEQ ID NO: 2217 - protein, 30 aa, Homo sapiens
VPAAGAVAAAEVTVEDAEALPAAAGEQEPR

SEQ ID NO: 2218 - protein, 16 aa, Homo sapiens
LFLLQQPLAPSGLTLK

SEQ ID NO: 2219 - protein, 16 aa, Homo sapiens
CVICGGPGVSDAYYCK

SEQ ID NO: 2220 - protein, 9 aa, Homo sapiens
HHPDLIFCR

SEQ ID NO: 2221 - protein, 13 aa, Homo sapiens
ICDECNYGSYQGR

SEQ ID NO: 2222 - protein, 15 aa, Homo sapiens
IKPSQNTETLELLLK

SEQ ID NO: 2223 - protein, 8 aa, Homo sapiens
FSEMQNER

SEQ ID NO: 2224 - protein, 15 aa, Homo sapiens
LGCDLDMFLDLDETR

SEQ ID NO: 2225 - protein, 10 aa, Homo sapiens
VLQNMEQCQK

SEQ ID NO: 2226 - protein, 11 aa, Homo sapiens
TDLTQDDFHLK

SEQ ID NO: 2227 - protein, 11 aa, Homo sapiens
VDLPLIDSLIR

SEQ ID NO: 2228 - protein, 22 aa, Homo sapiens
NADMSEEMQQDSVECATQALEK

SEQ ID NO: 2229 - protein, 8 aa, Homo sapiens
DIAAHIKK

SEQ ID NO: 2230 - protein, 11 aa, Homo sapiens
NFGSYVTHETK

SEQ ID NO: 2231 - protein, 12 aa, Homo sapiens
YNIEKDIAAHIK

SEQ ID NO: 2232 - protein, 12 aa, Homo sapiens
KYNPTWHCIVGR

SEQ ID NO: 2233 - protein, 13 aa, Homo sapiens
YNIEKDIAAHIKK

SEQ ID NO: 2234 - protein, 11 aa, Homo sapiens
YNPTWHCIVGR

SEQ ID NO: 2235 - protein, 13 aa, Homo sapiens
ELSPDIAHLASLK

SEQ ID NO: 2236 - protein, 14 aa, Homo sapiens
ADLATAPPHVTVVR

SEQ ID NO: 2237 - protein, 19 aa, Homo sapiens
APGPGLAQGLPQLHSLVLR

SEQ ID NO: 2238 - protein, 12 aa, Homo sapiens
DGPSLLVVEQVR

SEQ ID NO: 2239 - protein, 12 aa, Homo sapiens
ELLLTGPGLEER

SEQ ID NO: 2240 - protein, 18 aa, Homo sapiens
NALGPGLSPELGPLPALR

SEQ ID NO: 2241 - protein, 7 aa, Homo sapiens
SILEYLR

SEQ ID NO: 2242 - protein, 11 aa, Homo sapiens
TAATLATHELR

SEQ ID NO: 2243 - protein, 13 aa, Homo sapiens
APQDKPFEEEETK

SEQ ID NO: 2244 - protein, 19 aa, Homo sapiens
DLKDDFHSDTVLSILNEQR

SEQ ID NO: 2245 - protein, 19 aa, Homo sapiens
IGEFSSTGSTLPDTDHMVK

SEQ ID NO: 2246 - protein, 19 aa, Homo sapiens
GEIPEESNYVADPGGSLSK

SEQ ID NO: 2247 - protein, 13 aa, Homo sapiens
RQETVTDLAAAGK

SEQ ID NO: 2248 - protein, 21 aa, Homo sapiens
PALPGTSTNSNVAPLCQITVK

SEQ ID NO: 2249 - protein, 9 aa, Homo sapiens
EFVCQYCNK

SEQ ID NO: 2250 - protein, 10 aa, Homo sapiens
CFSVQGNLQK

SEQ ID NO: 2251 - protein, 10 aa, Homo sapiens
TAAALGMHQK

SEQ ID NO: 2252 - protein, 12 aa, Homo sapiens
LGISFLEDLTDR

SEQ ID NO: 2253 - protein, 8 aa, Homo sapiens
SFHAIDHR

SEQ ID NO: 2254 - protein, 10 aa, Homo sapiens
SPQPAAVLTR

SEQ ID NO: 2255 - protein, 8 aa, Homo sapiens
TASLCLER

SEQ ID NO: 2256 - protein, 11 aa, Homo sapiens
TDVCHEAEPVR

SEQ ID NO: 2257 - protein, 17 aa, Homo sapiens
TLAEHSYAVSSVAEAYR

SEQ ID NO: 2258 - protein, 10 aa, Homo sapiens
TTNIAEETSK

SEQ ID NO: 2259 - protein, 8 aa, Homo sapiens
VFALAEYR

SEQ ID NO: 2260 - protein, 11 aa, Homo sapiens
GIEDDLMDLIK

SEQ ID NO: 2261 - protein, 9 aa, Homo sapiens
TLAAFPAEK

SEQ ID NO: 2262 - protein, 11 aa, Homo sapiens
LTEQAVQAINK

SEQ ID NO: 2263 - protein, 27 aa, Homo sapiens
AIPLVLVSGNHDIGNTPTAETVEEFCR

SEQ ID NO: 2264 - protein, 23 aa, Homo sapiens
NAGGTYQNLDMVVSSAIGCQLGR

SEQ ID NO: 2265 - protein, 11 aa, Homo sapiens
SAAEAGGVFHR

SEQ ID NO: 2266 - protein, 9 aa, Homo sapiens
VVFSGHYHR

SEQ ID NO: 2267 - protein, 9 aa, Homo sapiens
EVYEEAGVK

SEQ ID NO: 2268 - protein, 15 aa, Homo sapiens
VLQCHKPVHAEYLEK

SEQ ID NO: 2269 - protein, 9 aa, Homo sapiens
TYDPEGFKK

SEQ ID NO: 2270 - protein, 11 aa, Homo sapiens
LLGVFEQNQDR

SEQ ID NO: 2271 - protein, 20 aa, Homo sapiens
WIVPGGGMEPEEEPGGAAVR

SEQ ID NO: 2272 - protein, 12 aa, Homo sapiens
LVNTPYVDNSYK

SEQ ID NO: 2273 - protein, 15 aa, Homo sapiens
WAGGGFLSTVGDLLK

SEQ ID NO: 2274 - protein, 10 aa, Homo sapiens
LLISHLSGIR

SEQ ID NO: 2275 - protein, 23 aa, Homo sapiens
QSFGGSLFAYSPGGAHGMLSSPK

SEQ ID NO: 2276 - protein, 13 aa, Homo sapiens
AAPDEDREPESAR

SEQ ID NO: 2277 - protein, 18 aa, Homo sapiens
ALQQNFLAMAAQLPMSIR

SEQ ID NO: 2278 - protein, 16 aa, Homo sapiens
GLNLPTSITSAAFTLR

SEQ ID NO: 2279 - protein, 12 aa, Homo sapiens
KPNATRPVTPPR

SEQ ID NO: 2280 - protein, 10 aa, Homo sapiens
NVQLQENEIR

SEQ ID NO: 2281 - protein, 7 aa, Homo sapiens
HSSLFVK

SEQ ID NO: 2282 - protein, 10 aa, Homo sapiens
LIWLYQNLIK

SEQ ID NO: 2283 - protein, 8 aa, Homo sapiens
EFLNELLK

SEQ ID NO: 2284 - protein, 11 aa, Homo sapiens
LAYPETKPEVR

SEQ ID NO: 2285 - protein, 12 aa, Homo sapiens
LPTASTCMNLLK

SEQ ID NO: 2286 - protein, 11 aa, Homo sapiens
GSPMSFEDSSR

SEQ ID NO: 2287 - protein, 7 aa, Homo sapiens
HYYFLGR

SEQ ID NO: 2288 - protein, 11 aa, Homo sapiens
LPEFYDETLLR

SEQ ID NO: 2289 - protein, 13 aa, Homo sapiens
QGLANVVSLEWLR

SEQ ID NO: 2290 - protein, 12 aa, Homo sapiens
QQTNTLLNLVWR

SEQ ID NO: 2291 - protein, 23 aa, Homo sapiens
TTNEGLLYPNPAAQMLVGDSFAR

SEQ ID NO: 2292 - protein, 21 aa, Homo sapiens
VHLLNAHGLDEAGIDGGGIFR

SEQ ID NO: 2293 - protein, 10 aa, Homo sapiens
VVEGFTDEEK

SEQ ID NO: 2294 - protein, 17 aa, Homo sapiens
ASLAAILEHSLFSTEQK

SEQ ID NO: 2295 - protein, 15 aa, Homo sapiens
SEMDEMAVQLDDVFR

SEQ ID NO: 2296 - protein, 14 aa, Homo sapiens
QLLSNELLLTQMEK

SEQ ID NO: 2297 - protein, 9 aa, Homo sapiens
ALDMLDAEK

SEQ ID NO: 2298 - protein, 7 aa, Homo sapiens
IVVEMIK

SEQ ID NO: 2299 - protein, 8 aa, Homo sapiens
LLNPSLQK

SEQ ID NO: 2300 - protein, 14 aa, Homo sapiens
AMDQVNALCEQLVK

SEQ ID NO: 2301 - protein, 18 aa, Homo sapiens
DYPQLVLPNFDMLYNHVK

SEQ ID NO: 2302 - protein, 15 aa, Homo sapiens
IFSFLLNTLQENVNK

SEQ ID NO: 2303 - protein, 10 aa, Homo sapiens
DPLLLAIIPK

SEQ ID NO: 2304 - protein, 17 aa, Homo sapiens
VLSDVDAFIAYVGTDQK

SEQ ID NO: 2305 - protein, 13 aa, Homo sapiens
THNTLYAPEMLAK

SEQ ID NO: 2306 - protein, 11 aa, Homo sapiens
TSFQMAGEWLK

SEQ ID NO: 2307 - protein, 17 aa, Homo sapiens
AGGFVVGYTSSGNPIFR

SEQ ID NO: 2308 - protein, 13 aa, Homo sapiens
AVTVMMDPNSTQR

SEQ ID NO: 2309 - protein, 12 aa, Homo sapiens
DIQQTLTQNMER

SEQ ID NO: 2310 - protein, 14 aa, Homo sapiens
LFSSVTFETVEESK

SEQ ID NO: 2311 - protein, 12 aa, Homo sapiens
SSTQMTWGALFR

SEQ ID NO: 2312 - protein, 21 aa, Homo sapiens
LPPYPYSSPSLVLPTQPHTPK

SEQ ID NO: 2313 - protein, 16 aa, Homo sapiens
VPLSPLSLLAGPADAR

SEQ ID NO: 2314 - protein, 15 aa, Homo sapiens
SGPLGDQPFAGLLPK

SEQ ID NO: 2315 - protein, 8 aa, Homo sapiens
EQELQVVR

SEQ ID NO: 2316 - protein, 17 aa, Homo sapiens
ESSGLVLLSSCPQTASR

SEQ ID NO: 2317 - protein, 8 aa, Homo sapiens
TLQCLGLR

SEQ ID NO: 2318 - protein, 10 aa, Homo sapiens
HCLLTCEECK

SEQ ID NO: 2319 - protein, 14 aa, Homo sapiens
HGLSEKGDSQPSAS

SEQ ID NO: 2320 - protein, 14 aa, Homo sapiens
GNQDKDAHFPPPSK

SEQ ID NO: 2321 - protein, 9 aa, Homo sapiens
FHFFEDQLR

SEQ ID NO: 2322 - protein, 12 aa, Homo sapiens
FLEYSISDEITK

SEQ ID NO: 2323 - protein, 14 aa, Homo sapiens
TFVSSFMSELSPVR

SEQ ID NO: 2324 - protein, 13 aa, Homo sapiens
AAILPTSIFLTNK

SEQ ID NO: 2325 - protein, 12 aa, Homo sapiens
AAMAVGGAGGSR

SEQ ID NO: 2326 - protein, 10 aa, Homo sapiens
LFDYSKPSAK

SEQ ID NO: 2327 - protein, 16 aa, Homo sapiens
LGMENDDTAVQYAIGR

SEQ ID NO: 2328 - protein, 21 aa, Homo sapiens
SISFHPSGDFILVGTQHPTLR

SEQ ID NO: 2329 - protein, 10 aa, Homo sapiens
TISLCCWDSR

SEQ ID NO: 2330 - protein, 18 aa, Homo sapiens
TQAVFNHTEDYVLLPDER

SEQ ID NO: 2331 - protein, 9 aa, Homo sapiens
YIQEAEMLR

SEQ ID NO: 2332 - protein, 7 aa, Homo sapiens
AYILAHK

SEQ ID NO: 2333 - protein, 7 aa, Homo sapiens
DAIQLWR

SEQ ID NO: 2334 - protein, 13 aa, Homo sapiens
EIAAFFPDFSEQR

SEQ ID NO: 2335 - protein, 8 aa, Homo sapiens
HVAPDSIR

SEQ ID NO: 2336 - protein, 14 aa, Homo sapiens
NTTHGSDSVVSASR

SEQ ID NO: 2337 - protein, 10 aa, Homo sapiens
WYEEEEPQLR

SEQ ID NO: 2338 - protein, 17 aa, Homo sapiens
EQVFLVPTGEVFEQQVK

SEQ ID NO: 2339 - protein, 15 aa, Homo sapiens
TDEGVAAPVSGGAAR

SEQ ID NO: 2340 - protein, 10 aa, Homo sapiens
HVDASFFLGK

SEQ ID NO: 2341 - protein, 12 aa, Homo sapiens
SLPLPSSVNRPR

SEQ ID NO: 2342 - protein, 21 aa, Homo sapiens
MELAHSLLLNEEALAQITEAK

SEQ ID NO: 2343 - protein, 12 aa, Homo sapiens
YVGGIGSGQHLK

SEQ ID NO: 2344 - protein, 11 aa, Homo sapiens
LYDILALLPPK

SEQ ID NO: 2345 - protein, 13 aa, Homo sapiens
LLGTVMATALMPK

SEQ ID NO: 2346 - protein, 11 aa, Homo sapiens
VHNLLVSSLDK

SEQ ID NO: 2347 - protein, 22 aa, Homo sapiens
NTGDKESSSANVSPFAPGVSSR

SEQ ID NO: 2348 - protein, 17 aa, Homo sapiens
STSVNLNQASGAVGSAK

SEQ ID NO: 2349 - protein, 15 aa, Homo sapiens
MLGSAFPETVNNLLK

SEQ ID NO: 2350 - protein, 12 aa, Homo sapiens
MAGLQALEDIIK

SEQ ID NO: 2351 - protein, 18 aa, Homo sapiens
SADNQVPPPVSAALQGIK

SEQ ID NO: 2352 - protein, 19 aa, Homo sapiens
IINLCENADQAHFDLALAR

SEQ ID NO: 2353 - protein, 14 aa, Homo sapiens
MAFMAATDHSNQLR

SEQ ID NO: 2354 - protein, 11 aa, Homo sapiens
MVVSIAEDLLR

SEQ ID NO: 2355 - protein, 18 aa, Homo sapiens
SALTLVMGPLDNPNPILR

SEQ ID NO: 2356 - protein, 16 aa, Homo sapiens
SFVAHCPELLTEDVIR

SEQ ID NO: 2357 - protein, 9 aa, Homo sapiens
VFAADCLCR

SEQ ID NO: 2358 - protein, 14 aa, Homo sapiens
VLSGLGGAAASSHR

SEQ ID NO: 2359 - protein, 18 aa, Homo sapiens
LLLAGYDDFNCNIWDAMK

SEQ ID NO: 2360 - protein, 20 aa, Homo sapiens
KACGDSTLTQITAGLDPVGR

SEQ ID NO: 2361 - protein, 19 aa, Homo sapiens
ACGDSTLTQITAGLDPVGR

SEQ ID NO: 2362 - protein, 13 aa, Homo sapiens
ELPGHTGYLSCCR

SEQ ID NO: 2363 - protein, 7 aa, Homo sapiens
SELEQLR

SEQ ID NO: 2364 - protein, 14 aa, Homo sapiens
SELEQLRQEAEQLR

SEQ ID NO: 2365 - protein, 14 aa, Homo sapiens
AFLASGPYLTHQQK

SEQ ID NO: 2366 - protein, 9 aa, Homo sapiens
EAEEEFWYR

SEQ ID NO: 2367 - protein, 9 aa, Homo sapiens
HLESWCVQR

SEQ ID NO: 2368 - protein, 19 aa, Homo sapiens
QHPQPYIFPDSPGGTSYER

SEQ ID NO: 2369 - protein, 17 aa, Homo sapiens
KEAVTFDQANPTQILGK

SEQ ID NO: 2370 - protein, 14 aa, Homo sapiens
FGTLLSGSWDTTAK

SEQ ID NO: 2371 - protein, 16 aa, Homo sapiens
EGAQFSSHLINLLNPK

SEQ ID NO: 2372 - protein, 16 aa, Homo sapiens
EAVTFDQANPTQILGK

SEQ ID NO: 2373 - protein, 11 aa, Homo sapiens
ESLMSHAIELK

SEQ ID NO: 2374 - protein, 17 aa, Homo sapiens
AINCPEDIVFPALDILR

SEQ ID NO: 2375 - protein, 9 aa, Homo sapiens
DFVTTAEDR

SEQ ID NO: 2376 - protein, 8 aa, Homo sapiens
VFTESEDR

SEQ ID NO: 2377 - protein, 23 aa, Homo sapiens
YVPGSSGSSNTLPTADPFTGAGR

SEQ ID NO: 2378 - protein, 24 aa, Homo sapiens
EELGLAVPEEHVWGLLRPVYDPQK

SEQ ID NO: 2379 - protein, 16 aa, Homo sapiens
ARPASAAVLVPLCSVR

SEQ ID NO: 2380 - protein, 14 aa, Homo sapiens
CDPADQDVVHTALR

SEQ ID NO: 2381 - protein, 10 aa, Homo sapiens
GVPALLYTLR

SEQ ID NO: 2382 - protein, 8 aa, Homo sapiens
LLAGATAR

SEQ ID NO: 2383 - protein, 16 aa, Homo sapiens
EKESELGDRPLQVGER

SEQ ID NO: 2384 - protein, 9 aa, Homo sapiens
LTFMDLELK

SEQ ID NO: 2385 - protein, 11 aa, Homo sapiens
QQVLPLDSIYK

SEQ ID NO: 2386 - protein, 11 aa, Homo sapiens
EINITSALAEK

SEQ ID NO: 2387 - protein, 13 aa, Homo sapiens
LYFKPIGDPVFAR

SEQ ID NO: 2388 - protein, 11 aa, Homo sapiens
GVITRPDLPSK

SEQ ID NO: 2389 - protein, 10 aa, Homo sapiens
LLLIDWPELK

SEQ ID NO: 2390 - protein, 14 aa, Homo sapiens
SLNSDISYFGVGGK

SEQ ID NO: 2391 - protein, 24 aa, Homo sapiens
DLQNPIIVQLCDQWDNPAPVQHVK

SEQ ID NO: 2392 - protein, 14 aa, Homo sapiens
SLFEASQQLLNEMK

SEQ ID NO: 2393 - protein, 17 aa, Homo sapiens
LIPYTSVEDFDWCTPPK

SEQ ID NO: 2394 - protein, 15 aa, Homo sapiens
GSNEEDTDTPLFIGK

SEQ ID NO: 2395 - protein, 19 aa, Homo sapiens
LSTSGNRPPANAETFSCNK

SEQ ID NO: 2396 - protein, 11 aa, Homo sapiens
VETTDCPVPPK

SEQ ID NO: 2397 - protein, 12 aa, Homo sapiens
ANLGVFSVFAPR

SEQ ID NO: 2398 - protein, 7 aa, Homo sapiens
DLCFTWR

SEQ ID NO: 2399 - protein, 7 aa, Homo sapiens
FGGLQNK

SEQ ID NO: 2400 - protein, 11 aa, Homo sapiens
FSFGLLDLPFR

SEQ ID NO: 2401 - protein, 11 aa, Homo sapiens
IAHLAQIEDDR

SEQ ID NO: 2402 - protein, 8 aa, Homo sapiens
NYFHLWTR

SEQ ID NO: 2403 - protein, 11 aa, Homo sapiens
QAVFFVGQSAR

SEQ ID NO: 2404 - protein, 9 aa, Homo sapiens
QLNNWAVYR

SEQ ID NO: 2405 - protein, 11 aa, Homo sapiens
TLPLFYGSIVR

SEQ ID NO: 2406 - protein, 13 aa, Homo sapiens
TTFQENTQSISVR

SEQ ID NO: 2407 - protein, 12 aa, Homo sapiens
GTMTEIYNDLSK

SEQ ID NO: 2408 - protein, 26 aa, Homo sapiens
MHPQSLAEEEIKTEQEVVEGMDISTR

SEQ ID NO: 2409 - protein, 21 aa, Homo sapiens
SSQGSSSSTQSAPSETASASK

SEQ ID NO: 2410 - protein, 10 aa, Homo sapiens
FGVFNYSPFR

SEQ ID NO: 2411 - protein, 12 aa, Homo sapiens
AVTLNPDNSYIK

SEQ ID NO: 2412 - protein, 11 aa, Homo sapiens
LDDSDREGSVK

SEQ ID NO: 2413 - protein, 11 aa, Homo sapiens
LALYNLLAYVK

SEQ ID NO: 2414 - protein, 16 aa, Homo sapiens
IDPENAEFLTALCELR

SEQ ID NO: 2415 - protein, 8 aa, Homo sapiens
SPGFASPK

SEQ ID NO: 2416 - protein, 14 aa, Homo sapiens
FGVSSESKPEEVKK

SEQ ID NO: 2417 - protein, 9 aa, Homo sapiens
FSKPIGDFK

SEQ ID NO: 2418 - protein, 11 aa, Homo sapiens
SGIDITDFQAK

SEQ ID NO: 2419 - protein, 14 aa, Homo sapiens
CVACETPKPGTCVK

SEQ ID NO: 2420 - protein, 9 aa, Homo sapiens
EGSVLDILK

SEQ ID NO: 2421 - protein, 7 aa, Homo sapiens
FSSPIVK

SEQ ID NO: 2422 - protein, 8 aa, Homo sapiens
FGDQGGFK

SEQ ID NO: 2423 - protein, 18 aa, Homo sapiens
GFDTSSSSSNSAASSSFK

SEQ ID NO: 2424 - protein, 15 aa, Homo sapiens
AGSSWQCDTCLLQNK

SEQ ID NO: 2425 - protein, 14 aa, Homo sapiens
ASGAGGVGGGGGGK

SEQ ID NO: 2426 - protein, 11 aa, Homo sapiens
SSFNLGTIETK

SEQ ID NO: 2427 - protein, 13 aa, Homo sapiens
TSQLGDSPFYPGK

SEQ ID NO: 2428 - protein, 18 aa, Homo sapiens
IGVSSDSGSINPMSEGFK

SEQ ID NO: 2429 - protein, 28 aa, Homo sapiens
FGLSSGLSNPVSLTPFQFGVSNLGQEEK

SEQ ID NO: 2430 - protein, 21 aa, Homo sapiens
FGVSSSSSGPSQTLTSTGNFK

SEQ ID NO: 2431 - protein, 19 aa, Homo sapiens
FVASKPLEEEEMEVPVLPK

SEQ ID NO: 2432 - protein, 14 aa, Homo sapiens
QQEPVTSTSLVFGK

SEQ ID NO: 2433 - protein, 10 aa, Homo sapiens
ASDKDITVSK

SEQ ID NO: 2434 - protein, 23 aa, Homo sapiens
GGFSFGNVEPASLPSASVFVLGR

SEQ ID NO: 2435 - protein, 18 aa, Homo sapiens
IDSVAAQPTATSPVVYTR

SEQ ID NO: 2436 - protein, 9 aa, Homo sapiens
NIVPGWLQR

SEQ ID NO: 2437 - protein, 13 aa, Homo sapiens
NVFSSSGTSFSGR

SEQ ID NO: 2438 - protein, 8 aa, Homo sapiens
PVSIATNR

SEQ ID NO: 2439 - protein, 15 aa, Homo sapiens
QLSAQSYGVTSSTAR

SEQ ID NO: 2440 - protein, 13 aa, Homo sapiens
VLPWLGAIDDSVK

SEQ ID NO: 2441 - protein, 22 aa, Homo sapiens
LMPLEAGIPDPPNMSAELIQLK

SEQ ID NO: 2442 - protein, 11 aa, Homo sapiens
AAAQQLGEVVK

SEQ ID NO: 2443 - protein, 8 aa, Homo sapiens
HGGLLGIK

SEQ ID NO: 2444 - protein, 29 aa, Homo sapiens
AQIADLPAGSSGNILVELDEAQKPYLVQR

SEQ ID NO: 2445 - protein, 9 aa, Homo sapiens
AVTLAVQPR

SEQ ID NO: 2446 - protein, 14 aa, Homo sapiens
FGDFVSDEVVAPVR

SEQ ID NO: 2447 - protein, 10 aa, Homo sapiens
IPVPINAELR

SEQ ID NO: 2448 - protein, 8 aa, Homo sapiens
LLQQCTTR

SEQ ID NO: 2449 - protein, 17 aa, Homo sapiens
NLHSPEYLEMALPLFCK

SEQ ID NO: 2450 - protein, 15 aa, Homo sapiens
EFWEIVHSFTDEQKR

SEQ ID NO: 2451 - protein, 12 aa, Homo sapiens
MMETFQQLITYK

SEQ ID NO: 2452 - protein, 12 aa, Homo sapiens
GFHMVTNESPLK

SEQ ID NO: 2453 - protein, 14 aa, Homo sapiens
NLVNDDDAIVAASK

SEQ ID NO: 2454 - protein, 19 aa, Homo sapiens
LPTSHTCFNVLLLPEYSSK

SEQ ID NO: 2455 - protein, 11 aa, Homo sapiens
VDPLETELGVK

SEQ ID NO: 2456 - protein, 10 aa, Homo sapiens
EREDYSPLIR

SEQ ID NO: 2457 - protein, 13 aa, Homo sapiens
VFSSAEALVQSFR

SEQ ID NO: 2458 - protein, 9 aa, Homo sapiens
VYEILELCR

SEQ ID NO: 2459 - protein, 7 aa, Homo sapiens
YNADQIR

SEQ ID NO: 2460 - protein, 8 aa, Homo sapiens
DWHRPCLK

SEQ ID NO: 2461 - protein, 10 aa, Homo sapiens
CNKEVYFAER

SEQ ID NO: 2462 - protein, 21 aa, Homo sapiens
YAAPSKEEEGGGDGHSEAAEK

SEQ ID NO: 2463 - protein, 16 aa, Homo sapiens
QFILQCDSDPELVQWK

SEQ ID NO: 2464 - protein, 11 aa, Homo sapiens
SLDWQMVFLQK

SEQ ID NO: 2465 - protein, 11 aa, Homo sapiens
ELLACSHPFSK

SEQ ID NO: 2466 - protein, 20 aa, Homo sapiens
GEVNAADAFDIGSFDEEDTK

SEQ ID NO: 2467 - protein, 12 aa, Homo sapiens
ISDLGLACDFSK

SEQ ID NO: 2468 - protein, 12 aa, Homo sapiens
QLGHEEDYALGK

SEQ ID NO: 2469 - protein, 24 aa, Homo sapiens
GEGEAPQSLLTMEEIQSVEETQIK

SEQ ID NO: 2470 - protein, 18 aa, Homo sapiens
ADLEAVLADVSYLMAMEK

SEQ ID NO: 2471 - protein, 10 aa, Homo sapiens
GGFGEVYGCR

SEQ ID NO: 2472 - protein, 7 aa, Homo sapiens
LGYLLFR

SEQ ID NO: 2473 - protein, 19 aa, Homo sapiens
MADLEAVLADVSYLMAMEK

SEQ ID NO: 2474 - protein, 11 aa, Homo sapiens
MGNPFLTQWQR

SEQ ID NO: 2475 - protein, 10 aa, Homo sapiens
QGETLALNER

SEQ ID NO: 2476 - protein, 19 aa, Homo sapiens
QVPPDLFQPYIEEICQNLR

SEQ ID NO: 2477 - protein, 9 aa, Homo sapiens
SLLEGLLQR

SEQ ID NO: 2478 - protein, 8 aa, Homo sapiens
YFYLFPNR

SEQ ID NO: 2479 - protein, 23 aa, Homo sapiens
QFASLEHGIVPVTSDCQYLFPAK

SEQ ID NO: 2480 - protein, 15 aa, Homo sapiens
AEVTMGDPHQQTLAR

SEQ ID NO: 2481 - protein, 18 aa, Homo sapiens
ELCGPWPSHQLLTNQLQR

SEQ ID NO: 2482 - protein, 8 aa, Homo sapiens
LDWELEQR

SEQ ID NO: 2483 - protein, 11 aa, Homo sapiens
YNHPQGFFSHR

SEQ ID NO: 2484 - protein, 7 aa, Homo sapiens
AFHIWSK

SEQ ID NO: 2485 - protein, 12 aa, Homo sapiens
EVDNTLSLEHQK

SEQ ID NO: 2486 - protein, 13 aa, Homo sapiens
TFAAQSLVQLLSK

SEQ ID NO: 2487 - protein, 9 aa, Homo sapiens
ILLQHICAK

SEQ ID NO: 2488 - protein, 25 aa, Homo sapiens
SQGNDILCLSLPDKPPPQPQQWNVR

SEQ ID NO: 2489 - protein, 27 aa, Homo sapiens
ASAETPAEEQELLTQVCGDVLSTCEHR

SEQ ID NO: 2490 - protein, 20 aa, Homo sapiens
ASAGHVAVSSPTPETGPLQR

SEQ ID NO: 2491 - protein, 15 aa, Homo sapiens
YIFTLGDIAQLCPAR

SEQ ID NO: 2492 - protein, 16 aa, Homo sapiens
IDMVPELLSSNLCSLK

SEQ ID NO: 2493 - protein, 29 aa, Homo sapiens
SQWVAPSSVVLHDEGQNEEDVEKEEETER

SEQ ID NO: 2494 - protein, 11 aa, Homo sapiens
TLVAGTIWNLK

SEQ ID NO: 2495 - protein, 13 aa, Homo sapiens
LGPLLLDPSLAVR

SEQ ID NO: 2496 - protein, 11 aa, Homo sapiens
SQAEIINALLK

SEQ ID NO: 2497 - protein, 23 aa, Homo sapiens
AQASLLACEGLAGVSLVPTAASK

SEQ ID NO: 2498 - protein, 12 aa, Homo sapiens
IDALEFLPFEGK

SEQ ID NO: 2499 - protein, 9 aa, Homo sapiens
TLTQEEKIK

SEQ ID NO: 2500 - protein, 11 aa, Homo sapiens
VHFFNSFFYDK

SEQ ID NO: 2501 - protein, 14 aa, Homo sapiens
LEDIFQQEFSTPSR

SEQ ID NO: 2502 - protein, 14 aa, Homo sapiens
LGLLGALMAEDGVR

SEQ ID NO: 2503 - protein, 18 aa, Homo sapiens
SGGGFGPDPGSGTTVPAR

SEQ ID NO: 2504 - protein, 9 aa, Homo sapiens
TITYFDSQR

SEQ ID NO: 2505 - protein, 10 aa, Homo sapiens
LLQAGFSELK

SEQ ID NO: 2506 - protein, 11 aa, Homo sapiens
VKVPLQDLMVR

SEQ ID NO: 2507 - protein, 8 aa, Homo sapiens
WNIKPESK

SEQ ID NO: 2508 - protein, 16 aa, Homo sapiens
EMACTTGVLQTLTLFK

SEQ ID NO: 2509 - protein, 14 aa, Homo sapiens
LEQQLVHVERPILR

SEQ ID NO: 2510 - protein, 12 aa, Homo sapiens
SPSPFHAVAECR

SEQ ID NO: 2511 - protein, 15 aa, Homo sapiens
VLDLGSPQLAMHSIR

SEQ ID NO: 2512 - protein, 12 aa, Homo sapiens
YASNAVSEALIR

SEQ ID NO: 2513 - protein, 11 aa, Homo sapiens
EMLGPVTFIWK

SEQ ID NO: 2514 - protein, 12 aa, Homo sapiens
AGPEGTSQEIPK

SEQ ID NO: 2515 - protein, 11 aa, Homo sapiens
IPILLIQQPGK

SEQ ID NO: 2516 - protein, 13 aa, Homo sapiens
LGWGSGWDVLLPK

SEQ ID NO: 2517 - protein, 8 aa, Homo sapiens
ISDQDLNR

SEQ ID NO: 2518 - protein, 11 aa, Homo sapiens
YITASTFAQAR

SEQ ID NO: 2519 - protein, 13 aa, Homo sapiens
EAGEAPKPGEEVK

SEQ ID NO: 2520 - protein, 19 aa, Homo sapiens
AVAEEYLSFFQFGGQSLDR

SEQ ID NO: 2521 - protein, 21 aa, Homo sapiens
INLAAATHSAPPFPAAVGSQR

SEQ ID NO: 2522 - protein, 17 aa, Homo sapiens
LHCPSDALDLWEEQLGR

SEQ ID NO: 2523 - protein, 15 aa, Homo sapiens
SFLQALVLSGETQER

SEQ ID NO: 2524 - protein, 18 aa, Homo sapiens
FNPDEDKQNLFVAGMSDK

SEQ ID NO: 2525 - protein, 11 aa, Homo sapiens
VWEWDIPVDFK

SEQ ID NO: 2526 - protein, 11 aa, Homo sapiens
VITCGWDGLIK

SEQ ID NO: 2527 - protein, 12 aa, Homo sapiens
LWDTETGQCISR

SEQ ID NO: 2528 - protein, 21 aa, Homo sapiens
NMLSGYAEPAHINDFMFEQQR

SEQ ID NO: 2529 - protein, 14 aa, Homo sapiens
SYLHIPQDVGVNLR

SEQ ID NO: 2530 - protein, 13 aa, Homo sapiens
DCLTQACSALTGK

SEQ ID NO: 2531 - protein, 18 aa, Homo sapiens
VVTSEALCGVPVLVLANK

SEQ ID NO: 2532 - protein, 10 aa, Homo sapiens
MYTLLSGLYK

SEQ ID NO: 2533 - protein, 12 aa, Homo sapiens
AALTLTPSAVNK

SEQ ID NO: 2534 - protein, 7 aa, Homo sapiens
MSASLVR

SEQ ID NO: 2535 - protein, 22 aa, Homo sapiens
NRPPGAADNTAWAVMTPQELWK

SEQ ID NO: 2536 - protein, 16 aa, Homo sapiens
DAAAFLLSCQIPGLVK

SEQ ID NO: 2537 - protein, 18 aa, Homo sapiens
HKPAFTEEDVLNIFPVVK

SEQ ID NO: 2538 - protein, 20 aa, Homo sapiens
GAMAVIDGNVMAINPSEETK

SEQ ID NO: 2539 - protein, 23 aa, Homo sapiens
SEDPPGQEAGSEEEGSSASGLAK

SEQ ID NO: 2540 - protein, 13 aa, Homo sapiens
AVGSISSTAFDIR

SEQ ID NO: 2541 - protein, 12 aa, Homo sapiens
ERPLCPLQPQNR

SEQ ID NO: 2542 - protein, 11 aa, Homo sapiens
FLENALAVSTK

SEQ ID NO: 2543 - protein, 11 aa, Homo sapiens
FNPDIFSPGVR

SEQ ID NO: 2544 - protein, 20 aa, Homo sapiens
GLEMDPIDCTPPEYILPGSR

SEQ ID NO: 2545 - protein, 8 aa, Homo sapiens
HYILDLLR

SEQ ID NO: 2546 - protein, 23 aa, Homo sapiens
IATPFQVYSWTAPQAEHAMDCVR

SEQ ID NO: 2547 - protein, 9 aa, Homo sapiens
IGIGELITR

SEQ ID NO: 2548 - protein, 12 aa, Homo sapiens
LGYEEHIPGQTR

SEQ ID NO: 2549 - protein, 11 aa, Homo sapiens
QELVDAFVEHR

SEQ ID NO: 2550 - protein, 10 aa, Homo sapiens
LTAQVEELSK

SEQ ID NO: 2551 - protein, 19 aa, Homo sapiens
MVVTGDNVGNVILLNMDGK

SEQ ID NO: 2552 - protein, 12 aa, Homo sapiens
GGDIMLWNFGIK

SEQ ID NO: 2553 - protein, 19 aa, Homo sapiens
ATSLAWHPTHPSTVAVGSK

SEQ ID NO: 2554 - protein, 8 aa, Homo sapiens
YNLIVVGR

SEQ ID NO: 2555 - protein, 13 aa, Homo sapiens
YPFPILINSAFLK

SEQ ID NO: 2556 - protein, 10 aa, Homo sapiens
QIQLLLQYLK

SEQ ID NO: 2557 - protein, 17 aa, Homo sapiens
NPAEPIAVQNNQQLALK

SEQ ID NO: 2558 - protein, 15 aa, Homo sapiens
ISEMIQGLATPVDLK

SEQ ID NO: 2559 - protein, 15 aa, Homo sapiens
HYFSIVPGNVSSSPR

SEQ ID NO: 2560 - protein, 13 aa, Homo sapiens
IPIDNMTNEMEQR

SEQ ID NO: 2561 - protein, 8 aa, Homo sapiens
LALSPSPR

SEQ ID NO: 2562 - protein, 11 aa, Homo sapiens
SLEDPYSQQIR

SEQ ID NO: 2563 - protein, 7 aa, Homo sapiens
VGNNFLR

SEQ ID NO: 2564 - protein, 17 aa, Homo sapiens
YGDLYQASFDADSATLR

SEQ ID NO: 2565 - protein, 11 aa, Homo sapiens
DVFLPSVDNMK

SEQ ID NO: 2566 - protein, 15 aa, Homo sapiens
DGRPTELGGCTAIVR

SEQ ID NO: 2567 - protein, 8 aa, Homo sapiens
LFELTVER

SEQ ID NO: 2568 - protein, 12 aa, Homo sapiens
DLLHPSLEEEKK

SEQ ID NO: 2569 - protein, 11 aa, Homo sapiens
DLLHPSLEEEK

SEQ ID NO: 2570 - protein, 13 aa, Homo sapiens
DLLHPSLEEEKKK

SEQ ID NO: 2571 - protein, 14 aa, Homo sapiens
RLVQSPNSYFMDVK

SEQ ID NO: 2572 - protein, 13 aa, Homo sapiens
LVQSPNSYFMDVK

SEQ ID NO: 2573 - protein, 8 aa, Homo sapiens
LTEGCSFR

SEQ ID NO: 2574 - protein, 14 aa, Homo sapiens
EAISLVCEAVPGAK

SEQ ID NO: 2575 - protein, 13 aa, Homo sapiens
DLFDMKPFEDALR

SEQ ID NO: 2576 - protein, 10 aa, Homo sapiens
HGSFVNKPTR

SEQ ID NO: 2577 - protein, 16 aa, Homo sapiens
ELFDDPSYVNVQNLDK

SEQ ID NO: 2578 - protein, 20 aa, Homo sapiens
ESTTTPGQYVLTGLQSGQPK

SEQ ID NO: 2579 - protein, 12 aa, Homo sapiens
HLLLVDPEGVVR

SEQ ID NO: 2580 - protein, 8 aa, Homo sapiens
PLSSILGR

SEQ ID NO: 2581 - protein, 29 aa, Homo sapiens
PTAPNAQTPSHLGATLPVGQPVGGDPEVR

SEQ ID NO: 2582 - protein, 13 aa, Homo sapiens
VEGGQLGGEEWTR

SEQ ID NO: 2583 - protein, 11 aa, Homo sapiens
VMGPGVSYLVR

SEQ ID NO: 2584 - protein, 15 aa, Homo sapiens
VPPPPQSVSMAEQLR

SEQ ID NO: 2585 - protein, 12 aa, Homo sapiens
YMGCVEVLQSMR

SEQ ID NO: 2586 - protein, 31 aa, Homo sapiens
TDQVIQSLIALVNDPQPEHPLRADLAEEYSK

SEQ ID NO: 2587 - protein, 18 aa, Homo sapiens
GQVCLPVISAENWKPATK

SEQ ID NO: 2588 - protein, 15 aa, Homo sapiens
IEINFPAEYPFKPPK

SEQ ID NO: 2589 - protein, 11 aa, Homo sapiens
ADLAEEYSKDR

SEQ ID NO: 2590 - protein, 7 aa, Homo sapiens
NAEEFTK

SEQ ID NO: 2591 - protein, 9 aa, Homo sapiens
IYHPNIDEK

SEQ ID NO: 2592 - protein, 9 aa, Homo sapiens
ADLAEEYSK

SEQ ID NO: 2593 - protein, 14 aa, Homo sapiens
GQVCLPVISAENWK

SEQ ID NO: 2594 - protein, 8 aa, Homo sapiens
NAEEFTKK

SEQ ID NO: 2595 - protein, 22 aa, Homo sapiens
TDQVIQSLIALVNDPQPEHPLR

SEQ ID NO: 2596 - protein, 9 aa, Homo sapiens
YYPQILTNK

SEQ ID NO: 2597 - protein, 12 aa, Homo sapiens
ALYIHAQPLHSR

SEQ ID NO: 2598 - protein, 7 aa, Homo sapiens
DCQEFYR

SEQ ID NO: 2599 - protein, 8 aa, Homo sapiens
LSEQQVDR

SEQ ID NO: 2600 - protein, 11 aa, Homo sapiens
VLGFSPVIIDR

SEQ ID NO: 2601 - protein, 23 aa, Homo sapiens
LPTSSKPPGAVPSNALTNPAPSK

SEQ ID NO: 2602 - protein, 9 aa, Homo sapiens
VPTSMVLTK

SEQ ID NO: 2603 - protein, 14 aa, Homo sapiens
VPTTLMPVNTVALK

SEQ ID NO: 2604 - protein, 14 aa, Homo sapiens
VPANPASVSTVPSK

SEQ ID NO: 2605 - protein, 14 aa, Homo sapiens
GPVSPSVSFQPLAR

SEQ ID NO: 2606 - protein, 11 aa, Homo sapiens
SEYIETASGNK

SEQ ID NO: 2607 - protein, 10 aa, Homo sapiens
MELGELLYNK

SEQ ID NO: 2608 - protein, 8 aa, Homo sapiens
SVIRPPFK

SEQ ID NO: 2609 - protein, 16 aa, Homo sapiens
AHSIQIMKVEEIAASK

SEQ ID NO: 2610 - protein, 15 aa, Homo sapiens
KSSGEIVYCGQVFEK

SEQ ID NO: 2611 - protein, 9 aa, Homo sapiens
VKNFGIWLR

SEQ ID NO: 2612 - protein, 14 aa, Homo sapiens
SSGEIVYCGQVFEK

SEQ ID NO: 2613 - protein, 10 aa, Homo sapiens
IFAPNHVVAK

SEQ ID NO: 2614 - protein, 8 aa, Homo sapiens
IKFPLPHR

SEQ ID NO: 2615 - protein, 9 aa, Homo sapiens
FWYFVSQLK

SEQ ID NO: 2616 - protein, 11 aa, Homo sapiens
SRFWYFVSQLK

SEQ ID NO: 2617 - protein, 8 aa, Homo sapiens
AHSIQIMK

SEQ ID NO: 2618 - protein, 8 aa, Homo sapiens
VEEIAASK

SEQ ID NO: 2619 - protein, 13 aa, Homo sapiens
DLTTAGAVTQCYR

SEQ ID NO: 2620 - protein, 16 aa, Homo sapiens
EYRDLTTAGAVTQCYR

SEQ ID NO: 2621 - protein, 7 aa, Homo sapiens
NFGIWLR

SEQ ID NO: 2622 - protein, 17 aa, Homo sapiens
SSDFLESAELDSGGFGK

SEQ ID NO: 2623 - protein, 13 aa, Homo sapiens
LQDEANYHLYGSR

SEQ ID NO: 2624 - protein, 11 aa, Homo sapiens
MQPDMSLNVIK

SEQ ID NO: 2625 - protein, 12 aa, Homo sapiens
VIHSILNSPYAK

SEQ ID NO: 2626 - protein, 29 aa, Homo sapiens
LYNPENIYLSEHGGGAGNNWASGFSQGEK

SEQ ID NO: 2627 - protein, 9 aa, Homo sapiens
AVLLDLEPR

SEQ ID NO: 2628 - protein, 15 aa, Homo sapiens
DVFFYQADDEHYIPR

SEQ ID NO: 2629 - protein, 32 aa, Homo sapiens
EADGSDSLEGFVLCHSIAGGTGSGLGSYLLER

SEQ ID NO: 2630 - protein, 21 aa, Homo sapiens
LHFLMTGYTPLTTDQSVASVR

SEQ ID NO: 2631 - protein, 18 aa, Homo sapiens
LTQNADCVVVLDNTALNR

SEQ ID NO: 2632 - protein, 8 aa, Homo sapiens
NVMVSTGR

SEQ ID NO: 2633 - protein, 24 aa, Homo sapiens
QLCAEHGISPEGIVEEFATEGTDR

SEQ ID NO: 2634 - protein, 18 aa, Homo sapiens
VSGLMMANHTSISSLFER

SEQ ID NO: 2635 - protein, 13 aa, Homo sapiens
GSDEVQILEMPSK

SEQ ID NO: 2636 - protein, 17 aa, Homo sapiens
IACHEEPVMDLDFDSQK

SEQ ID NO: 2637 - protein, 23 aa, Homo sapiens
AVTTLDGHGGQCVTWLQTLPQGR

SEQ ID NO: 2638 - protein, 19 aa, Homo sapiens
GTHELTNPGIAEVTIRPDR

SEQ ID NO: 2639 - protein, 10 aa, Homo sapiens
ILATAGWDHR

SEQ ID NO: 2640 - protein, 9 aa, Homo sapiens
ISLWSLYPR

SEQ ID NO: 2641 - protein, 10 aa, Homo sapiens
LCLWDLAEGR

SEQ ID NO: 2642 - protein, 16 aa, Homo sapiens
SAVVDSVCLESVGFCR

SEQ ID NO: 2643 - protein, 8 aa, Homo sapiens
WTLAVPGR

SEQ ID NO: 2644 - protein, 13 aa, Homo sapiens
AEGTVFTEEDFQK

SEQ ID NO: 2645 - protein, 13 aa, Homo sapiens
STVAESVSQQILR

SEQ ID NO: 2646 - protein, 17 aa, Homo sapiens
MVSISNYPLSAALTCAK

SEQ ID NO: 2647 - protein, 13 aa, Homo sapiens
NPVSDHFPVGCMK

SEQ ID NO: 2648 - protein, 20 aa, Homo sapiens
ELVPSSDPIVFVVGAFAHGK

SEQ ID NO: 2649 - protein, 9 aa, Homo sapiens
TYELLNCDK

SEQ ID NO: 2650 - protein, 12 aa, Homo sapiens
AGLLQVYIHTQK

SEQ ID NO: 2651 - protein, 10 aa, Homo sapiens
AAPSDGFKPR

SEQ ID NO: 2652 - protein, 11 aa, Homo sapiens
FCGLMVQLLHK

SEQ ID NO: 2653 - protein, 11 aa, Homo sapiens
NVLIEVNPQTR

SEQ ID NO: 2654 - protein, 14 aa, Homo sapiens
VGTSFSIPVVSDVR

SEQ ID NO: 2655 - protein, 16 aa, Homo sapiens
ACGVSRPVIACSVTIK

SEQ ID NO: 2656 - protein, 12 aa, Homo sapiens
AYPLADAHLTKK

SEQ ID NO: 2657 - protein, 13 aa, Homo sapiens
KLLDLVQQSCNYK

SEQ ID NO: 2658 - protein, 12 aa, Homo sapiens
LLDLVQQSCNYK

SEQ ID NO: 2659 - protein, 11 aa, Homo sapiens
AYPLADAHLTK

SEQ ID NO: 2660 - protein, 8 aa, Homo sapiens
TEADVNPK

SEQ ID NO: 2661 - protein, 12 aa, Homo sapiens
QQIQSIQQSIER

SEQ ID NO: 2662 - protein, 12 aa, Homo sapiens
NFDQEGLVEHCK

SEQ ID NO: 2663 - protein, 23 aa, Homo sapiens
FSYDTFVDYDVDEEDMMNQVLQR

SEQ ID NO: 2664 - protein, 8 aa, Homo sapiens
LFHSTDTK

SEQ ID NO: 2665 - protein, 13 aa, Homo sapiens
QIESTETSCHGCR

SEQ ID NO: 2666 - protein, 10 aa, Homo sapiens
RLPDGIGQLK

SEQ ID NO: 2667 - protein, 11 aa, Homo sapiens
DPTDEGIFISK

SEQ ID NO: 2668 - protein, 33 aa, Homo sapiens
AFAAVPTSHPPEDAPAQPPTPGPAASPEQLSFR

SEQ ID NO: 2669 - protein, 13 aa, Homo sapiens
ALAAVPSAGSVQR

SEQ ID NO: 2670 - protein, 23 aa, Homo sapiens
LAVLPPELAHTTELHVLDVAGNR

SEQ ID NO: 2671 - protein, 25 aa, Homo sapiens
LEQLDLGGNDLEVLPDTLGALPNLR

SEQ ID NO: 2672 - protein, 22 aa, Homo sapiens
LLEVNQQSLLGLTHGEAVQLLR

SEQ ID NO: 2673 - protein, 9 aa, Homo sapiens
LPDGFTQLR

SEQ ID NO: 2674 - protein, 13 aa, Homo sapiens
LPLLPPESPGPLR

SEQ ID NO: 2675 - protein, 18 aa, Homo sapiens
LPPEVANFMQLVELDVSR

SEQ ID NO: 2676 - protein, 13 aa, Homo sapiens
SLEELLLDANQLR

SEQ ID NO: 2677 - protein, 10 aa, Homo sapiens
VSLVGADDLR

SEQ ID NO: 2678 - protein, 18 aa, Homo sapiens
SKDPNSQVGACIVNSENK

SEQ ID NO: 2679 - protein, 15 aa, Homo sapiens
IVIDFDSINSRPSQK

SEQ ID NO: 2680 - protein, 15 aa, Homo sapiens
YPYVCHAELNAIMNK

SEQ ID NO: 2681 - protein, 16 aa, Homo sapiens
GCSMYVALFPCNECAK

SEQ ID NO: 2682 - protein, 11 aa, Homo sapiens
IVIDFDSINSR

SEQ ID NO: 2683 - protein, 11 aa, Homo sapiens
LLFNMAGVTFR

SEQ ID NO: 2684 - protein, 11 aa, Homo sapiens
YHDSDEATAAR

SEQ ID NO: 2685 - protein, 10 aa, Homo sapiens
FEEIPIAHIK

SEQ ID NO: 2686 - protein, 11 aa, Homo sapiens
KFEEIPIAHIK

SEQ ID NO: 2687 - protein, 17 aa, Homo sapiens
KGTGIAAQTAGIAAAAR

SEQ ID NO: 2688 - protein, 29 aa, Homo sapiens
ASHNNTQIQVVSASNEPLAFASCGTEGFR

SEQ ID NO: 2689 - protein, 15 aa, Homo sapiens
FSIYPPIPGEESSLR

SEQ ID NO: 2690 - protein, 10 aa, Homo sapiens
GLLLSCIEDK

SEQ ID NO: 2691 - protein, 19 aa, Homo sapiens
GLLLSCIEDKNPCIFFEPK

SEQ ID NO: 2692 - protein, 12 aa, Homo sapiens
TIIPWDVDTICK

SEQ ID NO: 2693 - protein, 20 aa, Homo sapiens
VCGYDTPFPHIFEPFYIPDK

SEQ ID NO: 2694 - protein, 17 aa, Homo sapiens
MNLFQSVTSALDNSLAK

SEQ ID NO: 2695 - protein, 28 aa, Homo sapiens
SPWGCVGHGALYHSQSPEAFFAHCPGIK

SEQ ID NO: 2696 - protein, 11 aa, Homo sapiens
LGVSCEVIDLR

SEQ ID NO: 2697 - protein, 13 aa, Homo sapiens
SGDLFNCGSLTIR

SEQ ID NO: 2698 - protein, 11 aa, Homo sapiens
WENIATILEAK

SEQ ID NO: 2699 - protein, 10 aa, Homo sapiens
ILAQDVAQLK

SEQ ID NO: 2700 - protein, 10 aa, Homo sapiens
NQSLVEENEK

SEQ ID NO: 2701 - protein, 12 aa, Homo sapiens
GQVSESEDSITK

SEQ ID NO: 2702 - protein, 9 aa, Homo sapiens
LTLLQVASR

SEQ ID NO: 2703 - protein, 13 aa, Homo sapiens
TVASTAMNSQSSR

SEQ ID NO: 2704 - protein, 9 aa, Homo sapiens
VTAVPTLLK

SEQ ID NO: 2705 - protein, 10 aa, Homo sapiens
TIFAYFTGSK

SEQ ID NO: 2706 - protein, 7 aa, Homo sapiens
DPNNDFR

SEQ ID NO: 2707 - protein, 19 aa, Homo sapiens
LVESECLQANLVEMLFSED

SEQ ID NO: 2708 - protein, 14 aa, Homo sapiens
SWCPDCVQAEPVVR

SEQ ID NO: 2709 - protein, 14 aa, Homo sapiens
YEEVSVSGFEEFHR

SEQ ID NO: 2710 - protein, 13 aa, Homo sapiens
HLATSDMLAAASK

SEQ ID NO: 2711 - protein, 12 aa, Homo sapiens
DYLEHITSIGPR

SEQ ID NO: 2712 - protein, 9 aa, Homo sapiens
VLLTEENKK

SEQ ID NO: 2713 - protein, 15 aa, Homo sapiens
FQFPAQVTDVSENAK

SEQ ID NO: 2714 - protein, 7 aa, Homo sapiens
LTSELDK

SEQ ID NO: 2715 - protein, 13 aa, Homo sapiens
TLDNNLATEAYER

SEQ ID NO: 2716 - protein, 18 aa, Homo sapiens
MLAVHFDKPGGPENLYVK

SEQ ID NO: 2717 - protein, 7 aa, Homo sapiens
KLQMAEK

SEQ ID NO: 2718 - protein, 22 aa, Homo sapiens
QMLVNAFTEQILPHFSTEGPQR

SEQ ID NO: 2719 - protein, 12 aa, Homo sapiens
NEWDPIIEWAEK

SEQ ID NO: 2720 - protein, 11 aa, Homo sapiens
LTVEQAVLLSR

SEQ ID NO: 2721 - protein, 12 aa, Homo sapiens
VEEPETLVELQR

SEQ ID NO: 2722 - protein, 16 aa, Homo sapiens
WGNIEWAHDYELQELR

SEQ ID NO: 2723 - protein, 16 aa, Homo sapiens
YVPVKGDHVIGIVTAK

SEQ ID NO: 2724 - protein, 20 aa, Homo sapiens
HKEPGSGSGGGVYWVDSQQK

SEQ ID NO: 2725 - protein, 21 aa, Homo sapiens
VDVGGSEPASLSYLSFEGATK

SEQ ID NO: 2726 - protein, 14 aa, Homo sapiens
LLAPDCEIIQEVGK

SEQ ID NO: 2727 - protein, 15 aa, Homo sapiens
AEPASVAAESLAGSR

SEQ ID NO: 2728 - protein, 14 aa, Homo sapiens
DMEPEMVCIDSCGR

SEQ ID NO: 2729 - protein, 8 aa, Homo sapiens
VVCGPGLR

SEQ ID NO: 2730 - protein, 8 aa, Homo sapiens
IQNPQILK

SEQ ID NO: 2731 - protein, 12 aa, Homo sapiens
SAAAIALPPIAK

SEQ ID NO: 2732 - protein, 8 aa, Homo sapiens
ILLYHAVK

SEQ ID NO: 2733 - protein, 12 aa, Homo sapiens
DLSKPIGALNPK

SEQ ID NO: 2734 - protein, 8 aa, Homo sapiens
AFLSDMIK

SEQ ID NO: 2735 - protein, 10 aa, Homo sapiens
AQQDVIMVLK

SEQ ID NO: 2736 - protein, 14 aa, Homo sapiens
VAVMFNFPDPATVK

SEQ ID NO: 2737 - protein, 13 aa, Homo sapiens
NPLGSTHPEATLK

SEQ ID NO: 2738 - protein, 12 aa, Homo sapiens
YGPDAFFNFPGK

SEQ ID NO: 2739 - protein, 14 aa, Homo sapiens
GSAMQVSPLMFTDK

SEQ ID NO: 2740 - protein, 8 aa, Homo sapiens
IINILTDK

SEQ ID NO: 2741 - protein, 14 aa, Homo sapiens
TAVEHATDEDILAK

SEQ ID NO: 2742 - protein, 15 aa, Homo sapiens
IEPFTTYFLNLQGGK

SEQ ID NO: 2743 - protein, 19 aa, Homo sapiens
DNPSIFVHSPHALMLQDVK

SEQ ID NO: 2744 - protein, 11 aa, Homo sapiens
YESWEDDQVPK

SEQ ID NO: 2745 - protein, 12 aa, Homo sapiens
ASPNVEAPQPHR

SEQ ID NO: 2746 - protein, 13 aa, Homo sapiens
CFLGSSETADANR

SEQ ID NO: 2747 - protein, 16 aa, Homo sapiens
CSGIGDNPGSETAAPR

SEQ ID NO: 2748 - protein, 11 aa, Homo sapiens
DGQYLLTGGDR

SEQ ID NO: 2749 - protein, 14 aa, Homo sapiens
DINVSVGSQQPDTK

SEQ ID NO: 2750 - protein, 12 aa, Homo sapiens
EIFVDFAPFLSR

SEQ ID NO: 2751 - protein, 8 aa, Homo sapiens
ENLANIFR

SEQ ID NO: 2752 - protein, 30 aa, Homo sapiens
FPSNSPVTHVAANTQPGLATPAVITVTANR

SEQ ID NO: 2753 - protein, 12 aa, Homo sapiens
IPEFNWSQMHQR

SEQ ID NO: 2754 - protein, 9 aa, Homo sapiens
LDYWEDDLR

SEQ ID NO: 2755 - protein, 9 aa, Homo sapiens
LLQDMDINR

SEQ ID NO: 2756 - protein, 23 aa, Homo sapiens
LPSVPTVDSVSQDPVSNMSITER

SEQ ID NO: 2757 - protein, 8 aa, Homo sapiens
LVCAVAVR

SEQ ID NO: 2758 - protein, 7 aa, Homo sapiens
MCDHLIR

SEQ ID NO: 2759 - protein, 14 aa, Homo sapiens
NAGLAFIELVNEGR

SEQ ID NO: 2760 - protein, 16 aa, Homo sapiens
SESYIGGNCYILSGSR

SEQ ID NO: 2761 - protein, 17 aa, Homo sapiens
SFGQTPSQLLIEPHPPR

SEQ ID NO: 2762 - protein, 14 aa, Homo sapiens
SPVDIVTGGISPVR

SEQ ID NO: 2763 - protein, 10 aa, Homo sapiens
TSEEFVHINR

SEQ ID NO: 2764 - protein, 11 aa, Homo sapiens
VANEAEFILSR

SEQ ID NO: 2765 - protein, 7 aa, Homo sapiens
VIATLLR

SEQ ID NO: 2766 - protein, 7 aa, Homo sapiens
WLFTEIR

SEQ ID NO: 2767 - protein, 15 aa, Homo sapiens
YLLQNTALEIFMANR

SEQ ID NO: 2768 - protein, 17 aa, Homo sapiens
TYADYESVNECMEGVCK

SEQ ID NO: 2769 - protein, 11 aa, Homo sapiens
SHTILLVQPTK

SEQ ID NO: 2770 - protein, 11 aa, Homo sapiens
ADTQTYQPYNK

SEQ ID NO: 2771 - protein, 16 aa, Homo sapiens
SHTILLVQPTKRPEGR

SEQ ID NO: 2772 - protein, 8 aa, Homo sapiens
MYEEHLKR

SEQ ID NO: 2773 - protein, 15 aa, Homo sapiens
ADTQTYQPYNKDWIK

SEQ ID NO: 2774 - protein, 7 aa, Homo sapiens
MYEEHLK

SEQ ID NO: 2775 - protein, 7 aa, Homo sapiens
IYVLLRR

SEQ ID NO: 2776 - protein, 16 aa, Homo sapiens
HIGSIDPNCNVSEVVK

SEQ ID NO: 2777 - protein, 19 aa, Homo sapiens
DTYGDDPVSNQNIQYFLDR

SEQ ID NO: 2778 - protein, 13 aa, Homo sapiens
TLSQFTDALVTIR

SEQ ID NO: 2779 - protein, 9 aa, Homo sapiens
FEGKPLLQR

SEQ ID NO: 2780 - protein, 16 aa, Homo sapiens
DLEAEHVEVEDTTLNR

SEQ ID NO: 2781 - protein, 8 aa, Homo sapiens
ELSAEYLR

SEQ ID NO: 2782 - protein, 9 aa, Homo sapiens
MELSAEYLR

SEQ ID NO: 2783 - protein, 16 aa, Homo sapiens
KVMVLDFVTPTPLGTR

SEQ ID NO: 2784 - protein, 16 aa, Homo sapiens
KVVYENAYGQFIGPHR

SEQ ID NO: 2785 - protein, 26 aa, Homo sapiens
YLGIPGDKEYCISSDDLFSLPYCPGK

SEQ ID NO: 2786 - protein, 8 aa, Homo sapiens
LYAGSTVK

SEQ ID NO: 2787 - protein, 23 aa, Homo sapiens
VVGFHVLGPNAGEVTQGFAAALK

SEQ ID NO: 2788 - protein, 17 aa, Homo sapiens
QFVPIKVEQIEAGTPGR

SEQ ID NO: 2789 - protein, 10 aa, Homo sapiens
KIGLETVGVK

SEQ ID NO: 2790 - protein, 11 aa, Homo sapiens
IGEHMEEHGIK

SEQ ID NO: 2791 - protein, 15 aa, Homo sapiens
WGLGGTCVNVGCIPK

SEQ ID NO: 2792 - protein, 10 aa, Homo sapiens
FLIATGERPR

SEQ ID NO: 2793 - protein, 16 aa, Homo sapiens
LMHQAALLGQALQDSR

SEQ ID NO: 2794 - protein, 17 aa, Homo sapiens
MIEAVQNHIGSLNWGYR

SEQ ID NO: 2795 - protein, 15 aa, Homo sapiens
VMVLDFVTPTPLGTR

SEQ ID NO: 2796 - protein, 25 aa, Homo sapiens
VVAQSTNSEEIIEGEYNTVMLAIGR

SEQ ID NO: 2797 - protein, 15 aa, Homo sapiens
VVYENAYGQFIGPHR

SEQ ID NO: 2798 - protein, 15 aa, Homo sapiens
IVFVPGCSIPLTIVK

SEQ ID NO: 2799 - protein, 16 aa, Homo sapiens
SDGGYTYDTSDLAAIK

SEQ ID NO: 2800 - protein, 13 aa, Homo sapiens
GNTAAYLLYAFTR

SEQ ID NO: 2801 - protein, 11 aa, Homo sapiens
LFEFAGYDVLR

SEQ ID NO: 2802 - protein, 10 aa, Homo sapiens
STIIGESISR

SEQ ID NO: 2803 - protein, 14 aa, Homo sapiens
VEIAGPGFINVHLR

SEQ ID NO: 2804 - protein, 16 aa, Homo sapiens
NQLSTLPVHLCNLPLK

SEQ ID NO: 2805 - protein, 9 aa, Homo sapiens
VAEITKEQR

SEQ ID NO: 2806 - protein, 18 aa, Homo sapiens
GPDPDSLSSQFMAYIEQR

SEQ ID NO: 2807 - protein, 21 aa, Homo sapiens
GGQVIQIPVADITVGDIAQVK

SEQ ID NO: 2808 - protein, 16 aa, Homo sapiens
TSPNEGLSGNPADLER

SEQ ID NO: 2809 - protein, 11 aa, Homo sapiens
APVEEAFLYAK

SEQ ID NO: 2810 - protein, 12 aa, Homo sapiens
AETNMVWYDWMR

SEQ ID NO: 2811 - protein, 17 aa, Homo sapiens
FTAPQAELYEAVLEIQR

SEQ ID NO: 2812 - protein, 17 aa, Homo sapiens
FLDGDELTLADCNLLPK

SEQ ID NO: 2813 - protein, 16 aa, Homo sapiens
AGIDGESIGNCPFSQR

SEQ ID NO: 2814 - protein, 14 aa, Homo sapiens
IQSALADIAQSQLK

SEQ ID NO: 2815 - protein, 14 aa, Homo sapiens
SQVLFHQLVPLQVK

SEQ ID NO: 2816 - protein, 9 aa, Homo sapiens
ILTLTYVDK

SEQ ID NO: 2817 - protein, 9 aa, Homo sapiens
EDMESVLDK

SEQ ID NO: 2818 - protein, 21 aa, Homo sapiens
NVAADIAVQLCESVANKLEGK

SEQ ID NO: 2819 - protein, 18 aa, Homo sapiens
KEGSDGPLATSKPVPAEK

SEQ ID NO: 2820 - protein, 8 aa, Homo sapiens
AVVAALMK

SEQ ID NO: 2821 - protein, 8 aa, Homo sapiens
TMVQLFEK

SEQ ID NO: 2822 - protein, 14 aa, Homo sapiens
GGNNSFTHEALTLK

SEQ ID NO: 2823 - protein, 13 aa, Homo sapiens
MQDNAPLMTALAK

SEQ ID NO: 2824 - protein, 13 aa, Homo sapiens
VMGTFSTVTSTVK

SEQ ID NO: 2825 - protein, 11 aa, Homo sapiens
GTLGGMFGMLK

SEQ ID NO: 2826 - protein, 9 aa, Homo sapiens
LIDGIVLTK

SEQ ID NO: 2827 - protein, 17 aa, Homo sapiens
NVAADIAVQLCESVANK

SEQ ID NO: 2828 - protein, 9 aa, Homo sapiens
LSALHPPEK

SEQ ID NO: 2829 - protein, 8 aa, Homo sapiens
AGAVEQLR

SEQ ID NO: 2830 - protein, 12 aa, Homo sapiens
ALADHSMAQTPR

SEQ ID NO: 2831 - protein, 14 aa, Homo sapiens
DAAGIAMEAIAFAR

SEQ ID NO: 2832 - protein, 7 aa, Homo sapiens
DIMDAQR

SEQ ID NO: 2833 - protein, 7 aa, Homo sapiens
LIDDVHR

SEQ ID NO: 2834 - protein, 10 aa, Homo sapiens
MLDFFTIFSK

SEQ ID NO: 2835 - protein, 14 aa, Homo sapiens
NQGFDVVLVDTAGR

SEQ ID NO: 2836 - protein, 15 aa, Homo sapiens
PIVFVGTGQTYCDLR

SEQ ID NO: 2837 - protein, 15 aa, Homo sapiens
QALQESLVQILQPQR

SEQ ID NO: 2838 - protein, 8 aa, Homo sapiens
LGPNDQYK

SEQ ID NO: 2839 - protein, 10 aa, Homo sapiens
FYSVNVDYSK

SEQ ID NO: 2840 - protein, 12 aa, Homo sapiens
LALFNPDVCWDR

SEQ ID NO: 2841 - protein, 10 aa, Homo sapiens
DLGYLQQWLK

SEQ ID NO: 2842 - protein, 24 aa, Homo sapiens
LLSGPWVPGSGVSGQALAVAPDGK

SEQ ID NO: 2843 - protein, 18 aa, Homo sapiens
ALEGIISNFGQTPCQLLK

SEQ ID NO: 2844 - protein, 12 aa, Homo sapiens
RPFSQNLVHVYK

SEQ ID NO: 2845 - protein, 15 aa, Homo sapiens
SLLEMMLESALTDIK

SEQ ID NO: 2846 - protein, 25 aa, Homo sapiens
TLCTLGPNETAPFKPEGELHELSTR

SEQ ID NO: 2847 - protein, 14 aa, Homo sapiens
CQEQLLALLQALGR

SEQ ID NO: 2848 - protein, 9 aa, Homo sapiens
CSWLVPLVR

SEQ ID NO: 2849 - protein, 17 aa, Homo sapiens
EISNFEYLMQLNTIAGR

SEQ ID NO: 2850 - protein, 11 aa, Homo sapiens
LFEGVCSLLDR

SEQ ID NO: 2851 - protein, 9 aa, Homo sapiens
LSAEEAAHR

SEQ ID NO: 2852 - protein, 9 aa, Homo sapiens
NQVYSWLLR

SEQ ID NO: 2853 - protein, 26 aa, Homo sapiens
TTTTTTGLPTPPVPATLAYTHPALTR

SEQ ID NO: 2854 - protein, 11 aa, Homo sapiens
TVQTSLLGLAR

SEQ ID NO: 2855 - protein, 21 aa, Homo sapiens
VGDVVLPPWASSPEDFIQQHR

SEQ ID NO: 2856 - protein, 15 aa, Homo sapiens
VLDQDTDAIAVHVVR

SEQ ID NO: 2857 - protein, 18 aa, Homo sapiens
YFDLTPSMAGIMVPPVQR

SEQ ID NO: 2858 - protein, 11 aa, Homo sapiens
YGVQFILDALR

SEQ ID NO: 2859 - protein, 13 aa, Homo sapiens
ISPDKLNFILCDK

SEQ ID NO: 2860 - protein, 20 aa, Homo sapiens
DLQEPVVPDPDVSIYLPVLK

SEQ ID NO: 2861 - protein, 14 aa, Homo sapiens
LLQFLAGQQVNPTK

SEQ ID NO: 2862 - protein, 16 aa, Homo sapiens
DLGNPPLASESTHEDR

SEQ ID NO: 2863 - protein, 12 aa, Homo sapiens
IVDGACLNHFTR

SEQ ID NO: 2864 - protein, 17 aa, Homo sapiens
GPSVPFSIFDEFLLSEK

SEQ ID NO: 2865 - protein, 15 aa, Homo sapiens
VSSQPVPWDFYINLK

SEQ ID NO: 2866 - protein, 9 aa, Homo sapiens
EIQTTQQER

SEQ ID NO: 2867 - protein, 13 aa, Homo sapiens
FYTGNDPLDVWDR

SEQ ID NO: 2868 - protein, 12 aa, Homo sapiens
YFLPFELACQSK

SEQ ID NO: 2869 - protein, 20 aa, Homo sapiens
ANFIEADKYFLPFELACQSK

SEQ ID NO: 2870 - protein, 11 aa, Homo sapiens
DFLRPFEHIMK

SEQ ID NO: 2871 - protein, 7 aa, Homo sapiens
FSHVLQK

SEQ ID NO: 2872 - protein, 10 aa, Homo sapiens
ACQVALDEIK

SEQ ID NO: 2873 - protein, 19 aa, Homo sapiens
LIAYGHITGNAPDSGAPGK

SEQ ID NO: 2874 - protein, 12 aa, Homo sapiens
LLYNLEMEQMAK

SEQ ID NO: 2875 - protein, 10 aa, Homo sapiens
GLECLVSILK

SEQ ID NO: 2876 - protein, 16 aa, Homo sapiens
CISQLELAQLIGTGVK

SEQ ID NO: 2877 - protein, 10 aa, Homo sapiens
LTDQEIGDGK

SEQ ID NO: 2878 - protein, 14 aa, Homo sapiens
GQSQLSNPTDDSWK

SEQ ID NO: 2879 - protein, 9 aa, Homo sapiens
YMSSQHLFK

SEQ ID NO: 2880 - protein, 12 aa, Homo sapiens
EIIEHGIELFNK

SEQ ID NO: 2881 - protein, 10 aa, Homo sapiens
TCYNIYLASK

SEQ ID NO: 2882 - protein, 7 aa, Homo sapiens
LVNDLSK

SEQ ID NO: 2883 - protein, 12 aa, Homo sapiens
DILEDVVTSAIK

SEQ ID NO: 2884 - protein, 9 aa, Homo sapiens
AFNSNYEQR

SEQ ID NO: 2885 - protein, 7 aa, Homo sapiens
DAFLVFR

SEQ ID NO: 2886 - protein, 9 aa, Homo sapiens
DAYVQALAR

SEQ ID NO: 2887 - protein, 9 aa, Homo sapiens
DSWEEIQQR

SEQ ID NO: 2888 - protein, 8 aa, Homo sapiens
HGLTEPER

SEQ ID NO: 2889 - protein, 8 aa, Homo sapiens
HLDVDLDR

SEQ ID NO: 2890 - protein, 11 aa, Homo sapiens
IACIFGMQLER

SEQ ID NO: 2891 - protein, 11 aa, Homo sapiens
IVEISYYNMNR

SEQ ID NO: 2892 - protein, 11 aa, Homo sapiens
LDGNAIVDFVR

SEQ ID NO: 2893 - protein, 15 aa, Homo sapiens
LDSTQVGDFLGDSAR

SEQ ID NO: 2894 - protein, 10 aa, Homo sapiens
MENQVLQEAR

SEQ ID NO: 2895 - protein, 16 aa, Homo sapiens
SGHELGMTPLQELSLR

SEQ ID NO: 2896 - protein, 7 aa, Homo sapiens
TFLEGFR

SEQ ID NO: 2897 - protein, 18 aa, Homo sapiens
VGCNPNEDVAIFAVDSLR

SEQ ID NO: 2898 - protein, 17 aa, Homo sapiens
VLQEYTSDDMNVAPGDR

SEQ ID NO: 2899 - protein, 9 aa, Homo sapiens
GIGQEHFFK

SEQ ID NO: 2900 - protein, 7 aa, Homo sapiens
RQELMEK

SEQ ID NO: 2901 - protein, 9 aa, Homo sapiens
IQFACSVCK

SEQ ID NO: 2902 - protein, 33 aa, Homo sapiens
ANDGGLAAGAPAMHMASYGPEPCTDNSDSLIAK

SEQ ID NO: 2903 - protein, 20 aa, Homo sapiens
VAPAPAAADAEVEQTDAESK

SEQ ID NO: 2904 - protein, 12 aa, Homo sapiens
TVEFLQEYIVNR

SEQ ID NO: 2905 - protein, 11 aa, Homo sapiens
TCLSQLLDIMK

SEQ ID NO: 2906 - protein, 14 aa, Homo sapiens
VILTSPLIRDELEK

SEQ ID NO: 2907 - protein, 11 aa, Homo sapiens
TQGPILTASGK

SEQ ID NO: 2908 - protein, 9 aa, Homo sapiens
LSAFGQIYK

SEQ ID NO: 2909 - protein, 8 aa, Homo sapiens
MVLLPVMK

SEQ ID NO: 2910 - protein, 9 aa, Homo sapiens
DNLPIQIQK

SEQ ID NO: 2911 - protein, 11 aa, Homo sapiens
HVSDWLDETNK

SEQ ID NO: 2912 - protein, 12 aa, Homo sapiens
DKPTETLLNTVK

SEQ ID NO: 2913 - protein, 16 aa, Homo sapiens
DGENVSMKDPPDLLDR

SEQ ID NO: 2914 - protein, 10 aa, Homo sapiens
AIDLMNALMR

SEQ ID NO: 2915 - protein, 12 aa, Homo sapiens
EDITHSAQHALR

SEQ ID NO: 2916 - protein, 12 aa, Homo sapiens
FPTYPVPHYSFF

SEQ ID NO: 2917 - protein, 7 aa, Homo sapiens
SCVIVLR

SEQ ID NO: 2918 - protein, 15 aa, Homo sapiens
YQVEQCVNEASIIIR

SEQ ID NO: 2919 - protein, 13 aa, Homo sapiens
TTFTFHQFSQWLK

SEQ ID NO: 2920 - protein, 7 aa, Homo sapiens
QFGLQEK

SEQ ID NO: 2921 - protein, 21 aa, Homo sapiens
DSGAASEQATAAPNPCSSSSR

SEQ ID NO: 2922 - protein, 12 aa, Homo sapiens
FVQALLAPCSLR

SEQ ID NO: 2923 - protein, 16 aa, Homo sapiens
QAGALPHEDLPFWLVR

SEQ ID NO: 2924 - protein, 16 aa, Homo sapiens
WQQLWETPTLLWEAPR

SEQ ID NO: 2925 - protein, 14 aa, Homo sapiens
YWFSQPGEQGQWWR

SEQ ID NO: 2926 - protein, 12 aa, Homo sapiens
FSMGSVVAGLLK

SEQ ID NO: 2927 - protein, 15 aa, Homo sapiens
IPVENILGEVGDGFK

SEQ ID NO: 2928 - protein, 9 aa, Homo sapiens
FFTEEVDSR

SEQ ID NO: 2929 - protein, 25 aa, Homo sapiens
LASGEHIAAFCLTEPASGSDAASIR

SEQ ID NO: 2930 - protein, 14 aa, Homo sapiens
SGPEAPEWYQVELK

SEQ ID NO: 2931 - protein, 21 aa, Homo sapiens
SGILAAESIFNQLTSENLQSK

SEQ ID NO: 2932 - protein, 14 aa, Homo sapiens
WLDFGEVSTQEALK

SEQ ID NO: 2933 - protein, 9 aa, Homo sapiens
WGLVPSWFK

SEQ ID NO: 2934 - protein, 11 aa, Homo sapiens
GTAGLLEQWLK

SEQ ID NO: 2935 - protein, 15 aa, Homo sapiens
SGSIGAADSPENWEK

SEQ ID NO: 2936 - protein, 11 aa, Homo sapiens
QPYFIYFPQIK

SEQ ID NO: 2937 - protein, 13 aa, Homo sapiens
MPAILDGEEAVSK

SEQ ID NO: 2938 - protein, 12 aa, Homo sapiens
SPQSNSPVLLSR

SEQ ID NO: 2939 - protein, 10 aa, Homo sapiens
MDGPVAEHAK

SEQ ID NO: 2940 - protein, 10 aa, Homo sapiens
GHASLVQELK

SEQ ID NO: 2941 - protein, 21 aa, Homo sapiens
KLGIPATIVLPESTSLQVVQR

SEQ ID NO: 2942 - protein, 20 aa, Homo sapiens
LGIPATIVLPESTSLQVVQR

SEQ ID NO: 2943 - protein, 8 aa, Homo sapiens
VWDEANLR

SEQ ID NO: 2944 - protein, 13 aa, Homo sapiens
KDHPFGFVAVPTK

SEQ ID NO: 2945 - protein, 12 aa, Homo sapiens
DHPFGFVAVPTK

SEQ ID NO: 2946 - protein, 10 aa, Homo sapiens
GTPWEGGLFK

SEQ ID NO: 2947 - protein, 13 aa, Homo sapiens
MLFKDDYPSSPPK

SEQ ID NO: 2948 - protein, 19 aa, Homo sapiens
NPDGTMNLMNWECAIPGKK

SEQ ID NO: 2949 - protein, 18 aa, Homo sapiens
NPDGTMNLMNWECAIPGK

SEQ ID NO: 2950 - protein, 9 aa, Homo sapiens
DDYPSSPPK

SEQ ID NO: 2951 - protein, 31 aa, Homo sapiens
QILLGIQELLNEPNIQDPAQAEAYTIYCQNR

SEQ ID NO: 2952 - protein, 11 aa, Homo sapiens
IAAQTLLGTAK

SEQ ID NO: 2953 - protein, 11 aa, Homo sapiens
MAGAIAQGLIR

SEQ ID NO: 2954 - protein, 23 aa, Homo sapiens
SDVCTPGGTTIYGLHALEQGGLR

SEQ ID NO: 2955 - protein, 14 aa, Homo sapiens
VEAQHILASAPTDR

SEQ ID NO: 2956 - protein, 18 aa, Homo sapiens
VLPNLPCVVQEGAIVMAR

SEQ ID NO: 2957 - protein, 17 aa, Homo sapiens
KMEGHYVHAGNIIATQR

SEQ ID NO: 2958 - protein, 15 aa, Homo sapiens
TFVHVVPAKPEGTFK

SEQ ID NO: 2959 - protein, 8 aa, Homo sapiens
EVYVPHPR

SEQ ID NO: 2960 - protein, 16 aa, Homo sapiens
MEGHYVHAGNIIATQR

SEQ ID NO: 2961 - protein, 10 aa, Homo sapiens
NTEAVDLITR

SEQ ID NO: 2962 - protein, 13 aa, Homo sapiens
ALLQEFDNAVLSK

SEQ ID NO: 2963 - protein, 10 aa, Homo sapiens
TTTIYEEDKR

SEQ ID NO: 2964 - protein, 17 aa, Homo sapiens
LVQAPLDADGDNVLQEK

SEQ ID NO: 2965 - protein, 16 aa, Homo sapiens
FAEVTQEVEVARPVDK

SEQ ID NO: 2966 - protein, 12 aa, Homo sapiens
NLQQELETQNQK

SEQ ID NO: 2967 - protein, 15 aa, Homo sapiens
NSMDIQCEVDALLER

SEQ ID NO: 2968 - protein, 11 aa, Homo sapiens
STEEAFEVFWR

SEQ ID NO: 2969 - protein, 16 aa, Homo sapiens
THTMTGSPGEGGLLPR

SEQ ID NO: 2970 - protein, 11 aa, Homo sapiens
ESESGGLRPNK

SEQ ID NO: 2971 - protein, 19 aa, Homo sapiens
QTFNPTDTNALVAAVAFGK

SEQ ID NO: 2972 - protein, 17 aa, Homo sapiens
QLEASLDALLSQVADLK

SEQ ID NO: 2973 - protein, 15 aa, Homo sapiens
ILALLDALSTVHSQK

SEQ ID NO: 2974 - protein, 15 aa, Homo sapiens
EVKEEIDPDEEESAK

SEQ ID NO: 2975 - protein, 16 aa, Homo sapiens
LVYAPLSGVGGVLYDK

SEQ ID NO: 2976 - protein, 11 aa, Homo sapiens
GMFNSALEVAK

SEQ ID NO: 2977 - protein, 22 aa, Homo sapiens
VLAEDEELYGDFEDLETGDVHK

SEQ ID NO: 2978 - protein, 12 aa, Homo sapiens
IAATGVVLDLDK

SEQ ID NO: 2979 - protein, 9 aa, Homo sapiens
AFAVQSAVR

SEQ ID NO: 2980 - protein, 12 aa, Homo sapiens
AGLSPANCQSDR

SEQ ID NO: 2981 - protein, 19 aa, Homo sapiens
FLVEAPHDWDLEEVMNSIR

SEQ ID NO: 2982 - protein, 10 aa, Homo sapiens
LLMSDIVFMR

SEQ ID NO: 2983 - protein, 14 aa, Homo sapiens
LLQDLQLGDEEDAR

SEQ ID NO: 2984 - protein, 11 aa, Homo sapiens
MEDLTNPEDIR

SEQ ID NO: 2985 - protein, 9 aa, Homo sapiens
STLIQCLIR

SEQ ID NO: 2986 - protein, 13 aa, Homo sapiens
NPPVIPVLQEIYK

SEQ ID NO: 2987 - protein, 9 aa, Homo sapiens
DQEDALNQR

SEQ ID NO: 2988 - protein, 11 aa, Homo sapiens
ELLGLQQAEER

SEQ ID NO: 2989 - protein, 20 aa, Homo sapiens
MEYFFDPDVLTEGELAPNDR

SEQ ID NO: 2990 - protein, 14 aa, Homo sapiens
NTESVGQLWLGLLR

SEQ ID NO: 2991 - protein, 8 aa, Homo sapiens
VYHPETGR

SEQ ID NO: 2992 - protein, 20 aa, Homo sapiens
YIVIEDPFDLNHNLGAGLSR

SEQ ID NO: 2993 - protein, 14 aa, Homo sapiens
KPSDDKHFGQAPSK

SEQ ID NO: 2994 - protein, 21 aa, Homo sapiens
NGPSLTEALENAGIFYEAQYK

SEQ ID NO: 2995 - protein, 15 aa, Homo sapiens
ESFADVLPEAAALVK

SEQ ID NO: 2996 - protein, 12 aa, Homo sapiens
SQALIEELLLYK

SEQ ID NO: 2997 - protein, 14 aa, Homo sapiens
VEITPESILSALSK

SEQ ID NO: 2998 - protein, 15 aa, Homo sapiens
VSSSCLDLPDSTEEK

SEQ ID NO: 2999 - protein, 17 aa, Homo sapiens
PSPGTPTSPSNLTSGLK

SEQ ID NO: 3000 - protein, 24 aa, Homo sapiens
PVNTSLSPSPALALPNLANVDLAK

SEQ ID NO: 3001 - protein, 23 aa, Homo sapiens
SLFSPQNTLAAPTGHPPTSGVEK

SEQ ID NO: 3002 - protein, 13 aa, Homo sapiens
LESESTSPSLEMK

SEQ ID NO: 3003 - protein, 11 aa, Homo sapiens
ALLDSSENCDR

SEQ ID NO: 3004 - protein, 12 aa, Homo sapiens
APQFQESVGSFR

SEQ ID NO: 3005 - protein, 21 aa, Homo sapiens
DHSSLLQGTLAEHFGVLPGPR

SEQ ID NO: 3006 - protein, 15 aa, Homo sapiens
GAPIETLGYHSASNR

SEQ ID NO: 3007 - protein, 33 aa, Homo sapiens
GNPGFSGLNLNIPILSSLGSSAPSESHPSDFQR

SEQ ID NO: 3008 - protein, 19 aa, Homo sapiens
GPTSTSIDNIDGTPVRDER

SEQ ID NO: 3009 - protein, 30 aa, Homo sapiens
GTPSDGVSLSNLTQPSLTATDQQQQEEHYR

SEQ ID NO: 3010 - protein, 17 aa, Homo sapiens
LSDTTEYQPILSSYSHR

SEQ ID NO: 3011 - protein, 12 aa, Homo sapiens
NVYPEEMIVALR

SEQ ID NO: 3012 - protein, 11 aa, Homo sapiens
DLLHPSPEEEK

SEQ ID NO: 3013 - protein, 12 aa, Homo sapiens
DLLHPSPEEEKR

SEQ ID NO: 3014 - protein, 13 aa, Homo sapiens
DLLHPSPEEEKRK

SEQ ID NO: 3015 - protein, 16 aa, Homo sapiens
LLGTPDIGSISNLLIK

SEQ ID NO: 3016 - protein, 12 aa, Homo sapiens
SAFDMFNFLASK

SEQ ID NO: 3017 - protein, 8 aa, Homo sapiens
VINIDGQK

SEQ ID NO: 3018 - protein, 18 aa, Homo sapiens
LNYIHWVEDLIGHQDSDK

SEQ ID NO: 3019 - protein, 12 aa, Homo sapiens
APEDVIQALEEK

SEQ ID NO: 3020 - protein, 11 aa, Homo sapiens
LPGVAGQYLFK

SEQ ID NO: 3021 - protein, 11 aa, Homo sapiens
DLMNQLCTYIR

SEQ ID NO: 3022 - protein, 13 aa, Homo sapiens
EDFGLSIDIPLER

SEQ ID NO: 3023 - protein, 13 aa, Homo sapiens
KNVEQNNLSDLIK

SEQ ID NO: 3024 - protein, 10 aa, Homo sapiens
VTYTEFCQGR

SEQ ID NO: 3025 - protein, 17 aa, Homo sapiens
DTTPDELLSAVMTAVLK

SEQ ID NO: 3026 - protein, 26 aa, Homo sapiens
SYAVVGVPPDIMGIGPAYAIPVALQK

SEQ ID NO: 3027 - protein, 21 aa, Homo sapiens
SITVTQDEGIRPSTTMEGLAK

SEQ ID NO: 3028 - protein, 15 aa, Homo sapiens
SKAEELGLPILGVLR

SEQ ID NO: 3029 - protein, 10 aa, Homo sapiens
QVITLLNELK

SEQ ID NO: 3030 - protein, 13 aa, Homo sapiens
AEELGLPILGVLR

SEQ ID NO: 3031 - protein, 16 aa, Homo sapiens
DCLIPMGITSENVAER

SEQ ID NO: 3032 - protein, 28 aa, Homo sapiens
DVNLRPEQLGDICVGNVLQPGAGAIMAR

SEQ ID NO: 3033 - protein, 19 aa, Homo sapiens
IAQFLSDIPETVPLSTVNR

SEQ ID NO: 3034 - protein, 20 aa, Homo sapiens
VNPLGGAVALGHPLGCTGAR

SEQ ID NO: 3035 - protein, 7 aa, Homo sapiens
VPEGLLK

SEQ ID NO: 3036 - protein, 26 aa, Homo sapiens
AGAVVAVPTDTLYGLACAASCSAALR

SEQ ID NO: 3037 - protein, 13 aa, Homo sapiens
DLLPGPVTLVMER

SEQ ID NO: 3038 - protein, 12 aa, Homo sapiens
DLNPFTPLVGIR

SEQ ID NO: 3039 - protein, 14 aa, Homo sapiens
LPGSGAVQAASPER

SEQ ID NO: 3040 - protein, 9 aa, Homo sapiens
PAANVTPTK

SEQ ID NO: 3041 - protein, 13 aa, Homo sapiens
EYLESLQCLESDK

SEQ ID NO: 3042 - protein, 25 aa, Homo sapiens
KKPEDSPSDDDVLIVYELTPTAEQK

SEQ ID NO: 3043 - protein, 12 aa, Homo sapiens
LLLDIPLQTPHK

SEQ ID NO: 3044 - protein, 19 aa, Homo sapiens
EGQWDCSACLVQNEGSSTK

SEQ ID NO: 3045 - protein, 18 aa, Homo sapiens
GVIFGQTSSTFTFADLAK

SEQ ID NO: 3046 - protein, 22 aa, Homo sapiens
SFVWHALDYADELPKPEQLAIR

SEQ ID NO: 3047 - protein, 15 aa, Homo sapiens
AWMWLASDFSDGDAK

SEQ ID NO: 3048 - protein, 14 aa, Homo sapiens
LHDSSGSQVGTGFK

SEQ ID NO: 3049 - protein, 19 aa, Homo sapiens
KAEDIENDALSPEEQEECK

SEQ ID NO: 3050 - protein, 7 aa, Homo sapiens
LEQLAAK

SEQ ID NO: 3051 - protein, 9 aa, Homo sapiens
SGFEDMFAK

SEQ ID NO: 3052 - protein, 13 aa, Homo sapiens
LKDAVAHCHEAER

SEQ ID NO: 3053 - protein, 17 aa, Homo sapiens
SGQSALYDALFSSQSPK

SEQ ID NO: 3054 - protein, 14 aa, Homo sapiens
FLGLLYELEENTDK

SEQ ID NO: 3055 - protein, 12 aa, Homo sapiens
NSIPEPIDPLFK

SEQ ID NO: 3056 - protein, 9 aa, Homo sapiens
YDKDVGQWK

SEQ ID NO: 3057 - protein, 10 aa, Homo sapiens
KLPVPLESVK

SEQ ID NO: 3058 - protein, 13 aa, Homo sapiens
KEGQWDCSVCLVR

SEQ ID NO: 3059 - protein, 14 aa, Homo sapiens
SDAGNLNFEFQVAK

SEQ ID NO: 3060 - protein, 23 aa, Homo sapiens
FGHVDQENSPSFMFQGSSNTEFK

SEQ ID NO: 3061 - protein, 8 aa, Homo sapiens
HVVFGFVK

SEQ ID NO: 3062 - protein, 22 aa, Homo sapiens
HDGTGGQSIYGDKFEDENFDVK

SEQ ID NO: 3063 - protein, 13 aa, Homo sapiens
FGESTTGFNFSFK

SEQ ID NO: 3064 - protein, 9 aa, Homo sapiens
LPPTFFCYK

SEQ ID NO: 3065 - protein, 18 aa, Homo sapiens
NLFASFPTEESSINYTFK

SEQ ID NO: 3066 - protein, 11 aa, Homo sapiens
TFEECQQNLMK

SEQ ID NO: 3067 - protein, 11 aa, Homo sapiens
SGEEDEEILFK

SEQ ID NO: 3068 - protein, 9 aa, Homo sapiens
FDAEVSQWK

SEQ ID NO: 3069 - protein, 9 aa, Homo sapiens
FGNTEQGFK

SEQ ID NO: 3070 - protein, 14 aa, Homo sapiens
VIPDFVCQGGDITK

SEQ ID NO: 3071 - protein, 9 aa, Homo sapiens
SGFEGMFTK

SEQ ID NO: 3072 - protein, 14 aa, Homo sapiens
ELLQSFDSALQSVK

SEQ ID NO: 3073 - protein, 15 aa, Homo sapiens
ELVGPPLAETVFTPK

SEQ ID NO: 3074 - protein, 13 aa, Homo sapiens
EGFSIPVSADGFK

SEQ ID NO: 3075 - protein, 11 aa, Homo sapiens
STSGEGFQFGK

SEQ ID NO: 3076 - protein, 12 aa, Homo sapiens
SGSSFVHQASFK

SEQ ID NO: 3077 - protein, 18 aa, Homo sapiens
QNQTTSAVSTPASSETSK

SEQ ID NO: 3078 - protein, 17 aa, Homo sapiens
QNQTTAISTPASSEISK

SEQ ID NO: 3079 - protein, 9 aa, Homo sapiens
FVFGSESVK

SEQ ID NO: 3080 - protein, 9 aa, Homo sapiens
EIVETFANK

SEQ ID NO: 3081 - protein, 11 aa, Homo sapiens
FGISEPGNQEK

SEQ ID NO: 3082 - protein, 15 aa, Homo sapiens
FGQGDLPKPINSDFR

SEQ ID NO: 3083 - protein, 15 aa, Homo sapiens
APGTNVAMASNQAVR

SEQ ID NO: 3084 - protein, 9 aa, Homo sapiens
CIACQNPGK

SEQ ID NO: 3085 - protein, 10 aa, Homo sapiens
DSLITPHVSR

SEQ ID NO: 3086 - protein, 16 aa, Homo sapiens
DTSFLGSDDIGNIDVR

SEQ ID NO: 3087 - protein, 25 aa, Homo sapiens
DTSFLGSDDIGNIDVREPELEDLTR

SEQ ID NO: 3088 - protein, 12 aa, Homo sapiens
EGQWDCSSCLVR

SEQ ID NO: 3089 - protein, 12 aa, Homo sapiens
EGQWDCSVCLVR

SEQ ID NO: 3090 - protein, 9 aa, Homo sapiens
EPELEDLTR

SEQ ID NO: 3091 - protein, 19 aa, Homo sapiens
ETNPVVFFDVCADGEPLGR

SEQ ID NO: 3092 - protein, 15 aa, Homo sapiens
GEAGQNLLEMMACDR

SEQ ID NO: 3093 - protein, 12 aa, Homo sapiens
ITMELFSNIVPR

SEQ ID NO: 3094 - protein, 11 aa, Homo sapiens
LLVQHEINTLR

SEQ ID NO: 3095 - protein, 13 aa, Homo sapiens
TGEEDEEEFFCNR

SEQ ID NO: 3096 - protein, 12 aa, Homo sapiens
TGSGLNSFYDQR

SEQ ID NO: 3097 - protein, 14 aa, Homo sapiens
VWLWTACDFADGER

SEQ ID NO: 3098 - protein, 7 aa, Homo sapiens
YDVGAIR

SEQ ID NO: 3099 - protein, 13 aa, Homo sapiens
YIASVQGSTPSPR

SEQ ID NO: 3100 - protein, 13 aa, Homo sapiens
VVGKDYLLCDYNR

SEQ ID NO: 3101 - protein, 9 aa, Homo sapiens
RLPPQQIEK

SEQ ID NO: 3102 - protein, 15 aa, Homo sapiens
SKQEALKNDLVEALK

SEQ ID NO: 3103 - protein, 8 aa, Homo sapiens
LVEDMENK

SEQ ID NO: 3104 - protein, 9 aa, Homo sapiens
NDLVEALKR

SEQ ID NO: 3105 - protein, 14 aa, Homo sapiens
KLEVEANNAFDQYR

SEQ ID NO: 3106 - protein, 8 aa, Homo sapiens
NDLVEALK

SEQ ID NO: 3107 - protein, 13 aa, Homo sapiens
LTSTVMLWLQTNK

SEQ ID NO: 3108 - protein, 20 aa, Homo sapiens
SPWSNKYDPPLEDGAMPSAR

SEQ ID NO: 3109 - protein, 14 aa, Homo sapiens
QEALKNDLVEALKR

SEQ ID NO: 3110 - protein, 14 aa, Homo sapiens
GCWDSIHVVEVQEK

SEQ ID NO: 3111 - protein, 20 aa, Homo sapiens
QMEKDETVSDCSPHIANIGR

SEQ ID NO: 3112 - protein, 10 aa, Homo sapiens
STLNEIYFGK

SEQ ID NO: 3113 - protein, 16 aa, Homo sapiens
DETVSDCSPHIANIGR

SEQ ID NO: 3114 - protein, 9 aa, Homo sapiens
DYLLCDYNR

SEQ ID NO: 3115 - protein, 15 aa, Homo sapiens
DYLLCDYNRDGDSYR

SEQ ID NO: 3116 - protein, 13 aa, Homo sapiens
LEVEANNAFDQYR

SEQ ID NO: 3117 - protein, 13 aa, Homo sapiens
SDQQLDCALDLMR

SEQ ID NO: 3118 - protein, 14 aa, Homo sapiens
SGSGTMNLGGSLTR

SEQ ID NO: 3119 - protein, 14 aa, Homo sapiens
YDPPLEDGAMPSAR

SEQ ID NO: 3120 - protein, 23 aa, Homo sapiens
CSFEETVDVLMEAAAHGESDPMK

SEQ ID NO: 3121 - protein, 20 aa, Homo sapiens
CIESNMLTDMTLQGIEQISK

SEQ ID NO: 3122 - protein, 11 aa, Homo sapiens
AKQDVIEVIEK

SEQ ID NO: 3123 - protein, 21 aa, Homo sapiens
YSPTSPTYSPTSPVYTPTSPK

SEQ ID NO: 3124 - protein, 15 aa, Homo sapiens
THSTHPDDEDSGPYK

SEQ ID NO: 3125 - protein, 18 aa, Homo sapiens
INISQVIAVVGQQNVEGK

SEQ ID NO: 3126 - protein, 16 aa, Homo sapiens
LSGEAFDWLLGEIESK

SEQ ID NO: 3127 - protein, 20 aa, Homo sapiens
INAGFGDDLNCIFNDDNAEK

SEQ ID NO: 3128 - protein, 24 aa, Homo sapiens
YGEDGLAGESVEFQNLATLKPSNK

SEQ ID NO: 3129 - protein, 9 aa, Homo sapiens
LPSDLHPIK

SEQ ID NO: 3130 - protein, 14 aa, Homo sapiens
FGVEQPEGDEDLTK

SEQ ID NO: 3131 - protein, 14 aa, Homo sapiens
YSPTSPTYSPTSPK

SEQ ID NO: 3132 - protein, 10 aa, Homo sapiens
IIITEDGEFK

SEQ ID NO: 3133 - protein, 11 aa, Homo sapiens
AEIQELAMVPR

SEQ ID NO: 3134 - protein, 15 aa, Homo sapiens
AHNNELEPTPGNTLR

SEQ ID NO: 3135 - protein, 16 aa, Homo sapiens
ALQEWILETDGVSLMR

SEQ ID NO: 3136 - protein, 14 aa, Homo sapiens
DVLSNAHIQNELER

SEQ ID NO: 3137 - protein, 8 aa, Homo sapiens
GHLMAITR

SEQ ID NO: 3138 - protein, 12 aa, Homo sapiens
HMCDGDIVIFNR

SEQ ID NO: 3139 - protein, 7 aa, Homo sapiens
IFHINPR

SEQ ID NO: 3140 - protein, 8 aa, Homo sapiens
LGGLMDPR

SEQ ID NO: 3141 - protein, 29 aa, Homo sapiens
LNLSVTTPYNADFDGDEMNLHLPQSLETR

SEQ ID NO: 3142 - protein, 10 aa, Homo sapiens
NSINQVVQLR

SEQ ID NO: 3143 - protein, 7 aa, Homo sapiens
RVDFSAR

SEQ ID NO: 3144 - protein, 23 aa, Homo sapiens
SLGTSAGSLVHISYLEMGHDITR

SEQ ID NO: 3145 - protein, 14 aa, Homo sapiens
TPSLTVFLLGQSAR

SEQ ID NO: 3146 - protein, 19 aa, Homo sapiens
TTSNDIVEIFTVLGIEAVR

SEQ ID NO: 3147 - protein, 18 aa, Homo sapiens
TVITPDPNLSIDQVGVPR

SEQ ID NO: 3148 - protein, 9 aa, Homo sapiens
VVLPCNLLR

SEQ ID NO: 3149 - protein, 20 aa, Homo sapiens
IGALQLQLSQLHEQCSSLEK

SEQ ID NO: 3150 - protein, 20 aa, Homo sapiens
ICEEQEQALQEMGLHLSQSK

SEQ ID NO: 3151 - protein, 11 aa, Homo sapiens
MELQQVEGLKK

SEQ ID NO: 3152 - protein, 11 aa, Homo sapiens
SFFGPLELVEK

SEQ ID NO: 3153 - protein, 12 aa, Homo sapiens
HLSCTVGDLQTK

SEQ ID NO: 3154 - protein, 14 aa, Homo sapiens
AAEGWSAPILTLAR

SEQ ID NO: 3155 - protein, 12 aa, Homo sapiens
ICSLQEEQQQLR

SEQ ID NO: 3156 - protein, 11 aa, Homo sapiens
LQEELSAATDR

SEQ ID NO: 3157 - protein, 8 aa, Homo sapiens
QDTLVALR

SEQ ID NO: 3158 - protein, 10 aa, Homo sapiens
SQLPGPGDLR

SEQ ID NO: 3159 - protein, 11 aa, Homo sapiens
VLLQSALSLGR

SEQ ID NO: 3160 - protein, 22 aa, Homo sapiens
YFPAGNVVNEGFFEENVLPPKK

SEQ ID NO: 3161 - protein, 13 aa, Homo sapiens
ASASDGSSFVVAR

SEQ ID NO: 3162 - protein, 13 aa, Homo sapiens
EAQQYSEALASTR

SEQ ID NO: 3163 - protein, 17 aa, Homo sapiens
STGGAPTFNVTVTKTDK

SEQ ID NO: 3164 - protein, 11 aa, Homo sapiens
EGVHGGLINKK

SEQ ID NO: 3165 - protein, 25 aa, Homo sapiens
AGWNAYIDNLMADGTCQDAAIVGYK

SEQ ID NO: 3166 - protein, 11 aa, Homo sapiens
TDKTLVLLMGK

SEQ ID NO: 3167 - protein, 18 aa, Homo sapiens
TFVNITPAEVGVLVGKDR

SEQ ID NO: 3168 - protein, 10 aa, Homo sapiens
KCYEMASHLR

SEQ ID NO: 3169 - protein, 8 aa, Homo sapiens
TLVLLMGK

SEQ ID NO: 3170 - protein, 16 aa, Homo sapiens
TKSTGGAPTFNVTVTK

SEQ ID NO: 3171 - protein, 10 aa, Homo sapiens
EGVHGGLINK

SEQ ID NO: 3172 - protein, 12 aa, Homo sapiens
DSPSVWAAVPGK

SEQ ID NO: 3173 - protein, 14 aa, Homo sapiens
STGGAPTFNVTVTK

SEQ ID NO: 3174 - protein, 16 aa, Homo sapiens
TFVNITPAEVGVLVGK

SEQ ID NO: 3175 - protein, 14 aa, Homo sapiens
SSFYVNGLTLGGQK

SEQ ID NO: 3176 - protein, 16 aa, Homo sapiens
DRSSFYVNGLTLGGQK

SEQ ID NO: 3177 - protein, 19 aa, Homo sapiens
CSVIRDSLLQDGEFSMDLR

SEQ ID NO: 3178 - protein, 9 aa, Homo sapiens
CYEMASHLR

SEQ ID NO: 3179 - protein, 14 aa, Homo sapiens
DSLLQDGEFSMDLR

SEQ ID NO: 3180 - protein, 12 aa, Homo sapiens
LIAEGNKEELRK

SEQ ID NO: 3181 - protein, 13 aa, Homo sapiens
EGFHFEETLTGFK

SEQ ID NO: 3182 - protein, 14 aa, Homo sapiens
DLTTGYDDSQPDKK

SEQ ID NO: 3183 - protein, 7 aa, Homo sapiens
FEISAIR

SEQ ID NO: 3184 - protein, 9 aa, Homo sapiens
MEFGTAGLR

SEQ ID NO: 3185 - protein, 10 aa, Homo sapiens
DVEKGELVAK

SEQ ID NO: 3186 - protein, 8 aa, Homo sapiens
KLDLSDTK

SEQ ID NO: 3187 - protein, 16 aa, Homo sapiens
MLSSGVCTSTVQLPGK

SEQ ID NO: 3188 - protein, 14 aa, Homo sapiens
EIQTTTGNQQVLVR

SEQ ID NO: 3189 - protein, 20 aa, Homo sapiens
GSGVTTYSVHPGTVQSELVR

SEQ ID NO: 3190 - protein, 13 aa, Homo sapiens
IVNVSSLAHHLGR

SEQ ID NO: 3191 - protein, 12 aa, Homo sapiens
LANILFTQELAR

SEQ ID NO: 3192 - protein, 10 aa, Homo sapiens
LVLYPSAQEK

SEQ ID NO: 3193 - protein, 34 aa, Homo sapiens
EAKPGAAEPEVGVPSSLSPSSPSSSWTETDVEER

SEQ ID NO: 3194 - protein, 22 aa, Homo sapiens
FSLLSQHDISFYEALESDPLHK

SEQ ID NO: 3195 - protein, 9 aa, Homo sapiens
KVTEDALIR

SEQ ID NO: 3196 - protein, 21 aa, Homo sapiens
AVFSDSLVPALEAFGLEGVFR

SEQ ID NO: 3197 - protein, 12 aa, Homo sapiens
NPPAFTELQLPR

SEQ ID NO: 3198 - protein, 17 aa, Homo sapiens
TVLYPYCAPYALELDYR

SEQ ID NO: 3199 - protein, 12 aa, Homo sapiens
VYTPSNADIGLR

SEQ ID NO: 3200 - protein, 9 aa, Homo sapiens
HIILVLSGK

SEQ ID NO: 3201 - protein, 27 aa, Homo sapiens
TLEEGHDFIQEFPGSPAFAALTSIAQK

SEQ ID NO: 3202 - protein, 16 aa, Homo sapiens
KVGILDVDLCGPSIPR

SEQ ID NO: 3203 - protein, 26 aa, Homo sapiens
GGGEELAQLAGVPFLGSVPLDPALMR

SEQ ID NO: 3204 - protein, 9 aa, Homo sapiens
GWAPVFLDR

SEQ ID NO: 3205 - protein, 14 aa, Homo sapiens
MEAAAEPGNLAGVR

SEQ ID NO: 3206 - protein, 12 aa, Homo sapiens
STISTELALALR

SEQ ID NO: 3207 - protein, 14 aa, Homo sapiens
LNLFSLDPDIDTLK

SEQ ID NO: 3208 - protein, 12 aa, Homo sapiens
FVFETPFTLSGK

SEQ ID NO: 3209 - protein, 15 aa, Homo sapiens
VLMGNIASGAEPYIK

SEQ ID NO: 3210 - protein, 16 aa, Homo sapiens
EALETSVGYAWLPLMK

SEQ ID NO: 3211 - protein, 16 aa, Homo sapiens
LLEPLDYETVIEELEK

SEQ ID NO: 3212 - protein, 31 aa, Homo sapiens
HDQIASQEYNIPIATSLPPNYLSFQDSASGK

SEQ ID NO: 3213 - protein, 10 aa, Homo sapiens
FDKLDQAETR

SEQ ID NO: 3214 - protein, 11 aa, Homo sapiens
HANSVDTSFSK

SEQ ID NO: 3215 - protein, 15 aa, Homo sapiens
ASLASLDSNPSTNEK

SEQ ID NO: 3216 - protein, 15 aa, Homo sapiens
AVSQLIADAGIGGSR

SEQ ID NO: 3217 - protein, 10 aa, Homo sapiens
LSDLYYDIHR

SEQ ID NO: 3218 - protein, 8 aa, Homo sapiens
MPFAWAVR

SEQ ID NO: 3219 - protein, 10 aa, Homo sapiens
PLSLIGSTLR

SEQ ID NO: 3220 - protein, 15 aa, Homo sapiens
STQTEASALLYFFMR

SEQ ID NO: 3221 - protein, 13 aa, Homo sapiens
TISYETLIAYWQR

SEQ ID NO: 3222 - protein, 16 aa, Homo sapiens
VLVQNEEDEITTTVTR

SEQ ID NO: 3223 - protein, 9 aa, Homo sapiens
FSDLGFEVK

SEQ ID NO: 3224 - protein, 20 aa, Homo sapiens
GNQHDVPVIPLDVVDNQTEK

SEQ ID NO: 3225 - protein, 19 aa, Homo sapiens
RGHPAGGEENMTETDAFYK

SEQ ID NO: 3226 - protein, 11 aa, Homo sapiens
IEIQTLTGLFK

SEQ ID NO: 3227 - protein, 11 aa, Homo sapiens
GTCADRDNLTR

SEQ ID NO: 3228 - protein, 17 aa, Homo sapiens
GNRPVILTYHDIGLNHK

SEQ ID NO: 3229 - protein, 19 aa, Homo sapiens
MDELQDVQLTEIKPLLNDK

SEQ ID NO: 3230 - protein, 22 aa, Homo sapiens
SVTSNQSDGTQESCESPDVLDR

SEQ ID NO: 3231 - protein, 17 aa, Homo sapiens
THSTSSSLGSGESPFSR

SEQ ID NO: 3232 - protein, 16 aa, Homo sapiens
YFLQGMGYIPSASMTR

SEQ ID NO: 3233 - protein, 8 aa, Homo sapiens
EVLLASQK

SEQ ID NO: 3234 - protein, 18 aa, Homo sapiens
FVEQLGSYDPLPNSHGEK

SEQ ID NO: 3235 - protein, 7 aa, Homo sapiens
GGHLTIR

SEQ ID NO: 3236 - protein, 8 aa, Homo sapiens
LVALNLDR

SEQ ID NO: 3237 - protein, 11 aa, Homo sapiens
DGLAQLMCELK

SEQ ID NO: 3238 - protein, 23 aa, Homo sapiens
AVASLNTPFIPANPNMSPLESIK

SEQ ID NO: 3239 - protein, 20 aa, Homo sapiens
ASPSEVVFLDDIGANLKPAR

SEQ ID NO: 3240 - protein, 15 aa, Homo sapiens
MVTEEEIQFYVQQFK

SEQ ID NO: 3241 - protein, 9 aa, Homo sapiens
GLLNDAFQK

SEQ ID NO: 3242 - protein, 17 aa, Homo sapiens
GEITLSQWIPLMEENCR

SEQ ID NO: 3243 - protein, 13 aa, Homo sapiens
INRPMLQAALMLR

SEQ ID NO: 3244 - protein, 19 aa, Homo sapiens
VCEAGGLFVNSPEEPSLSR

SEQ ID NO: 3245 - protein, 17 aa, Homo sapiens
ECLTAYYNDPAFYEECK

SEQ ID NO: 3246 - protein, 10 aa, Homo sapiens
HVEKDVLIPK

SEQ ID NO: 3247 - protein, 10 aa, Homo sapiens
ALDPADQHLR

SEQ ID NO: 3248 - protein, 16 aa, Homo sapiens
LPAAGVGDMVMATVKK

SEQ ID NO: 3249 - protein, 10 aa, Homo sapiens
GSAITGPVAK

SEQ ID NO: 3250 - protein, 9 aa, Homo sapiens
KVHPAVVIR

SEQ ID NO: 3251 - protein, 15 aa, Homo sapiens
LPAAGVGDMVMATVK

SEQ ID NO: 3252 - protein, 20 aa, Homo sapiens
ISLGLPVGAVINCADNTGAK

SEQ ID NO: 3253 - protein, 18 aa, Homo sapiens
LNRLPAAGVGDMVMATVK

SEQ ID NO: 3254 - protein, 8 aa, Homo sapiens
ECADLWPR

SEQ ID NO: 3255 - protein, 15 aa, Homo sapiens
ISNAQLQTELVEILK

SEQ ID NO: 3256 - protein, 9 aa, Homo sapiens
SNVEDSIVR

SEQ ID NO: 3257 - protein, 11 aa, Homo sapiens
YVEQLLTLFNR

SEQ ID NO: 3258 - protein, 9 aa, Homo sapiens
GTLIDNQFK

SEQ ID NO: 3259 - protein, 13 aa, Homo sapiens
FCNTEDEETMYLR

SEQ ID NO: 3260 - protein, 22 aa, Homo sapiens
PVCSFDPEGLIFAAGVNSEMVK

SEQ ID NO: 3261 - protein, 11 aa, Homo sapiens
IHVWNGESGIK

SEQ ID NO: 3262 - protein, 8 aa, Homo sapiens
TCEWTGLK

SEQ ID NO: 3263 - protein, 13 aa, Homo sapiens
HTGPITCLQFNPK

SEQ ID NO: 3264 - protein, 21 aa, Homo sapiens
RVVALSMSPVDDTFISGSLDK

SEQ ID NO: 3265 - protein, 8 aa, Homo sapiens
KYGVDLIR

SEQ ID NO: 3266 - protein, 8 aa, Homo sapiens
YLSLHDNK

SEQ ID NO: 3267 - protein, 20 aa, Homo sapiens
VVALSMSPVDDTFISGSLDK

SEQ ID NO: 3268 - protein, 14 aa, Homo sapiens
YTHAANTVVYSSNK

SEQ ID NO: 3269 - protein, 14 aa, Homo sapiens
GVVMHTFGGYANSK

SEQ ID NO: 3270 - protein, 7 aa, Homo sapiens
LTDSVLR

SEQ ID NO: 3271 - protein, 7 aa, Homo sapiens
YGVDLIR

SEQ ID NO: 3272 - protein, 8 aa, Homo sapiens
NYVENRPK

SEQ ID NO: 3273 - protein, 15 aa, Homo sapiens
NNPPTLEGNYSKPLK

SEQ ID NO: 3274 - protein, 16 aa, Homo sapiens
NTFVGTPFWMAPEVIK

SEQ ID NO: 3275 - protein, 24 aa, Homo sapiens
GAIYLAEEACPGISDTMVAQLVQR

SEQ ID NO: 3276 - protein, 15 aa, Homo sapiens
SQACGGNLGSIEELR

SEQ ID NO: 3277 - protein, 14 aa, Homo sapiens
YLGPACDLTLFDFK

SEQ ID NO: 3278 - protein, 13 aa, Homo sapiens
SFMHVNTNANFYK

SEQ ID NO: 3279 - protein, 12 aa, Homo sapiens
AADFIDQALAQK

SEQ ID NO: 3280 - protein, 14 aa, Homo sapiens
IYVGNASVAQDIPK

SEQ ID NO: 3281 - protein, 10 aa, Homo sapiens
DSGITYLGIK

SEQ ID NO: 3282 - protein, 15 aa, Homo sapiens
ANDTQEFNLSAYFER

SEQ ID NO: 3283 - protein, 18 aa, Homo sapiens
EIGPNDGFLAQLCQLNDR

SEQ ID NO: 3284 - protein, 13 aa, Homo sapiens
LGITHVLNAAEGR

SEQ ID NO: 3285 - protein, 12 aa, Homo sapiens
SPTLVIAYLMMR

SEQ ID NO: 3286 - protein, 10 aa, Homo sapiens
ILSNVFCLIK

SEQ ID NO: 3287 - protein, 18 aa, Homo sapiens
KEYAMVDPEDISITELYR

SEQ ID NO: 3288 - protein, 13 aa, Homo sapiens
ESFCITSFLCSTK

SEQ ID NO: 3289 - protein, 12 aa, Homo sapiens
IGCTVSLLNFYK

SEQ ID NO: 3290 - protein, 9 aa, Homo sapiens
LVDQFFVMK

SEQ ID NO: 3291 - protein, 11 aa, Homo sapiens
LKEIDGSEIVK

SEQ ID NO: 3292 - protein, 8 aa, Homo sapiens
YQEAFFVK

SEQ ID NO: 3293 - protein, 18 aa, Homo sapiens
EVVEMSPLENAIEVLENK

SEQ ID NO: 3294 - protein, 9 aa, Homo sapiens
MMEASLYDK

SEQ ID NO: 3295 - protein, 10 aa, Homo sapiens
ILIRPEMFPK

SEQ ID NO: 3296 - protein, 9 aa, Homo sapiens
ELFNSILLK

SEQ ID NO: 3297 - protein, 7 aa, Homo sapiens
LYDLHLK

SEQ ID NO: 3298 - protein, 9 aa, Homo sapiens
QEHIQEVLK

SEQ ID NO: 3299 - protein, 11 aa, Homo sapiens
GIFPSSYVHLK

SEQ ID NO: 3300 - protein, 15 aa, Homo sapiens
AVNPTPSSWSLDSGK

SEQ ID NO: 3301 - protein, 13 aa, Homo sapiens
TLPDGTHELIVHK

SEQ ID NO: 3302 - protein, 8 aa, Homo sapiens
FFLSQESK

SEQ ID NO: 3303 - protein, 13 aa, Homo sapiens
KIAEQYESYYDYR

SEQ ID NO: 3304 - protein, 12 aa, Homo sapiens
EYILSHPEDGEK

SEQ ID NO: 3305 - protein, 12 aa, Homo sapiens
CEENTNLQDTTR

SEQ ID NO: 3306 - protein, 27 aa, Homo sapiens
DFISFGSGEPPASEYHSFVLYHNNSPR

SEQ ID NO: 3307 - protein, 13 aa, Homo sapiens
EFLTYPMQTEWQR

SEQ ID NO: 3308 - protein, 17 aa, Homo sapiens
ERPCSAIYPTPVEPSQR

SEQ ID NO: 3309 - protein, 12 aa, Homo sapiens
ESGVSLIATVTR

SEQ ID NO: 3310 - protein, 14 aa, Homo sapiens
EYSSVFSHGVSITR

SEQ ID NO: 3311 - protein, 12 aa, Homo sapiens
HTTSVSPSPAGR

SEQ ID NO: 3312 - protein, 15 aa, Homo sapiens
LDWGNEQLGLDLVPR

SEQ ID NO: 3313 - protein, 15 aa, Homo sapiens
LFSLATGGQNEEEFR

SEQ ID NO: 3314 - protein, 13 aa, Homo sapiens
MLFNHIGDGALPR

SEQ ID NO: 3315 - protein, 9 aa, Homo sapiens
NDLYITIER

SEQ ID NO: 3316 - protein, 11 aa, Homo sapiens
QVLVGHLTHDR

SEQ ID NO: 3317 - protein, 13 aa, Homo sapiens
TVESQLYTNPDSR

SEQ ID NO: 3318 - protein, 9 aa, Homo sapiens
YGVVIASFR

SEQ ID NO: 3319 - protein, 25 aa, Homo sapiens
YNLTGSNAGLAVSLQLLHGDIEQIR

SEQ ID NO: 3320 - protein, 10 aa, Homo sapiens
NTAASLQQWK

SEQ ID NO: 3321 - protein, 18 aa, Homo sapiens
GTGQSDDSDIWDDTALIK

SEQ ID NO: 3322 - protein, 12 aa, Homo sapiens
NGDICETSGKPK

SEQ ID NO: 3323 - protein, 18 aa, Homo sapiens
SAPWNSFLPPPPPMPGPR

SEQ ID NO: 3324 - protein, 15 aa, Homo sapiens
ELNSSPQPYLVPFLK

SEQ ID NO: 3325 - protein, 29 aa, Homo sapiens
IMLTTPQQIQLNPLQPVPVVKPAVLPGTK

SEQ ID NO: 3326 - protein, 11 aa, Homo sapiens
QYENHIFVGSK

SEQ ID NO: 3327 - protein, 20 aa, Homo sapiens
QLAEFVPLDYSVPIEIPTIK

SEQ ID NO: 3328 - protein, 12 aa, Homo sapiens
YQIDDKPNNQIR

SEQ ID NO: 3329 - protein, 15 aa, Homo sapiens
AVACDCLLQEHFYLR

SEQ ID NO: 3330 - protein, 13 aa, Homo sapiens
YPPIVASMTADSK

SEQ ID NO: 3331 - protein, 19 aa, Homo sapiens
ILSTELSEESFPTLLLISK

SEQ ID NO: 3332 - protein, 13 aa, Homo sapiens
VLAPELIPSILEK

SEQ ID NO: 3333 - protein, 15 aa, Homo sapiens
VLQPPKGDVAAECVR

SEQ ID NO: 3334 - protein, 15 aa, Homo sapiens
CLQLLRPGGILAVLR

SEQ ID NO: 3335 - protein, 11 aa, Homo sapiens
EQCLLPPEDSR

SEQ ID NO: 3336 - protein, 9 aa, Homo sapiens
GDVAAECVR

SEQ ID NO: 3337 - protein, 26 aa, Homo sapiens
LLTLEQPQGDSMMTCEQAQLLANLAR

SEQ ID NO: 3338 - protein, 8 aa, Homo sapiens
LWQYLLSR

SEQ ID NO: 3339 - protein, 9 aa, Homo sapiens
PGGILAVLR

SEQ ID NO: 3340 - protein, 15 aa, Homo sapiens
VVTCEVDAQPPELGR

SEQ ID NO: 3341 - protein, 13 aa, Homo sapiens
VGILLDEASGVNK

SEQ ID NO: 3342 - protein, 18 aa, Homo sapiens
SDGEMVLPGFPDADSFVK

SEQ ID NO: 3343 - protein, 14 aa, Homo sapiens
NQQPVLPAGLQVPK

SEQ ID NO: 3344 - protein, 17 aa, Homo sapiens
SDMYILNESLTDPAIVK

SEQ ID NO: 3345 - protein, 10 aa, Homo sapiens
AAAEQAISVR

SEQ ID NO: 3346 - protein, 13 aa, Homo sapiens
AQNIMESFENPFR

SEQ ID NO: 3347 - protein, 24 aa, Homo sapiens
ERPQDRPEDLDVPPALADFIHQQR

SEQ ID NO: 3348 - protein, 15 aa, Homo sapiens
SFPGFQAFCETQGDR

SEQ ID NO: 3349 - protein, 12 aa, Homo sapiens
TEDFIIDTLELR

SEQ ID NO: 3350 - protein, 13 aa, Homo sapiens
LAANSDHLMQIQK

SEQ ID NO: 3351 - protein, 13 aa, Homo sapiens
KNDPLPISTVGTR

SEQ ID NO: 3352 - protein, 12 aa, Homo sapiens
GPVSLLSLWSNR

SEQ ID NO: 3353 - protein, 11 aa, Homo sapiens
IMWNELETLVR

SEQ ID NO: 3354 - protein, 16 aa, Homo sapiens
SILEDPPSISEGCGGR

SEQ ID NO: 3355 - protein, 23 aa, Homo sapiens
STAPVMDLLGLDAPVACSIANSK

SEQ ID NO: 3356 - protein, 9 aa, Homo sapiens
KLEPVVFEK

SEQ ID NO: 3357 - protein, 11 aa, Homo sapiens
LYEAYLPETFR

SEQ ID NO: 3358 - protein, 8 aa, Homo sapiens
NLGVHISR

SEQ ID NO: 3359 - protein, 13 aa, Homo sapiens
RPQIDPAVEGFIR

SEQ ID NO: 3360 - protein, 8 aa, Homo sapiens
SLDINAFR

SEQ ID NO: 3361 - protein, 14 aa, Homo sapiens
GCLEGSQGTQALHK

SEQ ID NO: 3362 - protein, 12 aa, Homo sapiens
THSLVCPETVSR

SEQ ID NO: 3363 - protein, 7 aa, Homo sapiens
VSSVLNR

SEQ ID NO: 3364 - protein, 12 aa, Homo sapiens
VTFEDATDFFGR

SEQ ID NO: 3365 - protein, 7 aa, Homo sapiens
VVIYHLR

SEQ ID NO: 3366 - protein, 12 aa, Homo sapiens
LKEYEAAVEQLK

SEQ ID NO: 3367 - protein, 11 aa, Homo sapiens
TAGTLFGEGFR

SEQ ID NO: 3368 - protein, 16 aa, Homo sapiens
VVQYNINTEELYSYLK

SEQ ID NO: 3369 - protein, 20 aa, Homo sapiens
EQSLPSVMGSVPEGVLEDIK

SEQ ID NO: 3370 - protein, 21 aa, Homo sapiens
GVAQTPGSVEEDALLCGPVSK

SEQ ID NO: 3371 - protein, 11 aa, Homo sapiens
VNPYEEVDQEK

SEQ ID NO: 3372 - protein, 14 aa, Homo sapiens
SDKPNASDPSVPLK

SEQ ID NO: 3373 - protein, 16 aa, Homo sapiens
FHEALESILSPQETLK

SEQ ID NO: 3374 - protein, 12 aa, Homo sapiens
SGYIESVQHILK

SEQ ID NO: 3375 - protein, 12 aa, Homo sapiens
YSNLVQSVLSSR

SEQ ID NO: 3376 - protein, 14 aa, Homo sapiens
MSGLIVGSAFGPIK

SEQ ID NO: 3377 - protein, 12 aa, Homo sapiens
QLIPIFTDVALK

SEQ ID NO: 3378 - protein, 29 aa, Homo sapiens
SKEGDVEEPTDDSLPTTGDAGGREPMEEK

SEQ ID NO: 3379 - protein, 15 aa, Homo sapiens
TPSEALWKPTHEDSK

SEQ ID NO: 3380 - protein, 12 aa, Homo sapiens
HPAPEDPDWIKR

SEQ ID NO: 3381 - protein, 15 aa, Homo sapiens
GLCNFLMSDEEYDDR

SEQ ID NO: 3382 - protein, 16 aa, Homo sapiens
NEAPEGNLGDFAEFQR

SEQ ID NO: 3383 - protein, 19 aa, Homo sapiens
TFEEAAAQLLESSVQNLFK

SEQ ID NO: 3384 - protein, 10 aa, Homo sapiens
GYGFVSFFNK

SEQ ID NO: 3385 - protein, 8 aa, Homo sapiens
AAFAPFGR

SEQ ID NO: 3386 - protein, 20 aa, Homo sapiens
MIMDTAGNDPYCFVEFHEHR

SEQ ID NO: 3387 - protein, 18 aa, Homo sapiens
WDAENAIQQMGGQWLGGR

SEQ ID NO: 3388 - protein, 27 aa, Homo sapiens
KTQEQDEEVGLGTEEDPSLPALLTQPR

SEQ ID NO: 3389 - protein, 16 aa, Homo sapiens
LLSPSILKPFPLWTGK

SEQ ID NO: 3390 - protein, 14 aa, Homo sapiens
VDDYSQEWAAQTEK

SEQ ID NO: 3391 - protein, 19 aa, Homo sapiens
SNSSPLQQMTFETSFQFLK

SEQ ID NO: 3392 - protein, 20 aa, Homo sapiens
DSDGSVVQFLYGEDGLDIPK

SEQ ID NO: 3393 - protein, 14 aa, Homo sapiens
FKEEVNHYSNEINK

SEQ ID NO: 3394 - protein, 15 aa, Homo sapiens
AALNLPEAASYDEVR

SEQ ID NO: 3395 - protein, 10 aa, Homo sapiens
DLDNAGELGR

SEQ ID NO: 3396 - protein, 21 aa, Homo sapiens
GSTVNTMQISCLLGQIELEGR

SEQ ID NO: 3397 - protein, 7 aa, Homo sapiens
HPNTLLR

SEQ ID NO: 3398 - protein, 14 aa, Homo sapiens
IIEESTHCGPQAVR

SEQ ID NO: 3399 - protein, 34 aa, Homo sapiens
SLCEPGEAVGLLAAQSIGEPSTQMTLNTFHFAGR

SEQ ID NO: 3400 - protein, 9 aa, Homo sapiens
SPGTQEMLR

SEQ ID NO: 3401 - protein, 18 aa, Homo sapiens
SVPGFNPDSMCESQVIIR

SEQ ID NO: 3402 - protein, 11 aa, Homo sapiens
TALSAVDMTQR

SEQ ID NO: 3403 - protein, 8 aa, Homo sapiens
YAEVLDLR

SEQ ID NO: 3404 - protein, 12 aa, Homo sapiens
HFVGMLPEKDCR

SEQ ID NO: 3405 - protein, 8 aa, Homo sapiens
CSTPEEIK

SEQ ID NO: 3406 - protein, 16 aa, Homo sapiens
EILVGDVGVTITDPFK

SEQ ID NO: 3407 - protein, 8 aa, Homo sapiens
CIIVEEGK

SEQ ID NO: 3408 - protein, 9 aa, Homo sapiens
HFVGMLPEK

SEQ ID NO: 3409 - protein, 9 aa, Homo sapiens
KCSTPEEIK

SEQ ID NO: 3410 - protein, 11 aa, Homo sapiens
AVIFCLSADKK

SEQ ID NO: 3411 - protein, 11 aa, Homo sapiens
YALYDASFETK

SEQ ID NO: 3412 - protein, 10 aa, Homo sapiens
AVIFCLSADK

SEQ ID NO: 3413 - protein, 10 aa, Homo sapiens
KCSTPEEIKK

SEQ ID NO: 3414 - protein, 12 aa, Homo sapiens
ASGVQVADEVCR

SEQ ID NO: 3415 - protein, 9 aa, Homo sapiens
CSTPEEIKK

SEQ ID NO: 3416 - protein, 13 aa, Homo sapiens
HECQANGPEDLNR

SEQ ID NO: 3417 - protein, 13 aa, Homo sapiens
HLSGEFGKPYFIK

SEQ ID NO: 3418 - protein, 22 aa, Homo sapiens
ELSTDIEDFVHPGHGDLSGWAK

SEQ ID NO: 3419 - protein, 16 aa, Homo sapiens
HHVLQTAHPSPLSVYR

SEQ ID NO: 3420 - protein, 9 aa, Homo sapiens
LMGFVAEER

SEQ ID NO: 3421 - protein, 12 aa, Homo sapiens
TLYSFFSPSPAR

SEQ ID NO: 3422 - protein, 27 aa, Homo sapiens
IQHSITAQDHQPTPDSCIISMVVGQLK

SEQ ID NO: 3423 - protein, 16 aa, Homo sapiens
ADEDPIMGFHQMFLLK

SEQ ID NO: 3424 - protein, 8 aa, Homo sapiens
LSSLPFQK

SEQ ID NO: 3425 - protein, 7 aa, Homo sapiens
LALHNFG

SEQ ID NO: 3426 - protein, 14 aa, Homo sapiens
NINDAWVCTNDMFR

SEQ ID NO: 3427 - protein, 16 aa, Homo sapiens
NDPLLVGVPASENPFK

SEQ ID NO: 3428 - protein, 13 aa, Homo sapiens
SCENLAPFNTALK

SEQ ID NO: 3429 - protein, 8 aa, Homo sapiens
AAVDGLSK

SEQ ID NO: 3430 - protein, 9 aa, Homo sapiens
FLFSLFGQK

SEQ ID NO: 3431 - protein, 12 aa, Homo sapiens
VLSTVHTHSSVK

SEQ ID NO: 3432 - protein, 20 aa, Homo sapiens
DIVINANPASPPLSLLVLHR

SEQ ID NO: 3433 - protein, 17 aa, Homo sapiens
FSIQTMCPIEGEGNIAR

SEQ ID NO: 3434 - protein, 7 aa, Homo sapiens
LLCEHFR

SEQ ID NO: 3435 - protein, 7 aa, Homo sapiens
LPNVHGR

SEQ ID NO: 3436 - protein, 25 aa, Homo sapiens
SYGPAPGAGHVQEESNLSLQALESR

SEQ ID NO: 3437 - protein, 9 aa, Homo sapiens
VELPTCMYR

SEQ ID NO: 3438 - protein, 18 aa, Homo sapiens
ENPGFDFSGAEISGNYTK

SEQ ID NO: 3439 - protein, 11 aa, Homo sapiens
AQDIQCGLQSR

SEQ ID NO: 3440 - protein, 9 aa, Homo sapiens
HVALSVGGR

SEQ ID NO: 3441 - protein, 17 aa, Homo sapiens
LFDSTIADEGTWTLEDR

SEQ ID NO: 3442 - protein, 18 aa, Homo sapiens
FQNPQTEGVNAVEDEIKK

SEQ ID NO: 3443 - protein, 20 aa, Homo sapiens
AGQTQPNPGILPIQPALTPR

SEQ ID NO: 3444 - protein, 15 aa, Homo sapiens
LTDPIPTTETSIAPR

SEQ ID NO: 3445 - protein, 11 aa, Homo sapiens
SATTTPSGSPR

SEQ ID NO: 3446 - protein, 10 aa, Homo sapiens
YSQDMHCLIR

SEQ ID NO: 3447 - protein, 13 aa, Homo sapiens
CGVPFTDLLDAAK

SEQ ID NO: 3448 - protein, 13 aa, Homo sapiens
YLQQLAEKPLETR

SEQ ID NO: 3449 - protein, 12 aa, Homo sapiens
GGLGAPPLQSAR

SEQ ID NO: 3450 - protein, 11 aa, Homo sapiens
LSSCDMCELAR

SEQ ID NO: 3451 - protein, 18 aa, Homo sapiens
SAPYEFPEESPIEQLEER

SEQ ID NO: 3452 - protein, 10 aa, Homo sapiens
ALHGSWFDGK

SEQ ID NO: 3453 - protein, 15 aa, Homo sapiens
INHANHTGSNHTYLK

SEQ ID NO: 3454 - protein, 22 aa, Homo sapiens
GTGVSEDGELSIENPFGETFGK

SEQ ID NO: 3455 - protein, 9 aa, Homo sapiens
TLMMNTLYK

SEQ ID NO: 3456 - protein, 13 aa, Homo sapiens
LSEPEEELLQQFK

SEQ ID NO: 3457 - protein, 16 aa, Homo sapiens
FPQALTSNTPLKPSNK

SEQ ID NO: 3458 - protein, 25 aa, Homo sapiens
ISASGPESLLGGPGGASAAPAAGSK

SEQ ID NO: 3459 - protein, 26 aa, Homo sapiens
KLTPLLPPPLTDMDSTLDSSTGSLLK

SEQ ID NO: 3460 - protein, 21 aa, Homo sapiens
AAAAASAPQQLSDEELFSQLR

SEQ ID NO: 3461 - protein, 19 aa, Homo sapiens
APPAPLAASEVTNSNSAER

SEQ ID NO: 3462 - protein, 11 aa, Homo sapiens
AVDFLAANESR

SEQ ID NO: 3463 - protein, 29 aa, Homo sapiens
DGAVEDEEGEGEDGEERDPETEEPLWASR

SEQ ID NO: 3464 - protein, 10 aa, Homo sapiens
IGGADFLVWR

SEQ ID NO: 3465 - protein, 16 aa, Homo sapiens
TNNHIGGGAFSVDSPR

SEQ ID NO: 3466 - protein, 17 aa, Homo sapiens
VLLGFSSDESDVEASPR

SEQ ID NO: 3467 - protein, 20 aa, Homo sapiens
FTDCGHFQNTEFHELITVVK

SEQ ID NO: 3468 - protein, 17 aa, Homo sapiens
ESIWLPFMETELHCDEK

SEQ ID NO: 3469 - protein, 20 aa, Homo sapiens
ANCPYIVQFGSTDDPFLPWK

SEQ ID NO: 3470 - protein, 13 aa, Homo sapiens
ASGYFTRPWQWEK

SEQ ID NO: 3471 - protein, 12 aa, Homo sapiens
EQQEVADRLETK

SEQ ID NO: 3472 - protein, 15 aa, Homo sapiens
TIIIGHSSGAIAAMR

SEQ ID NO: 3473 - protein, 9 aa, Homo sapiens
QAFTLLGVK

SEQ ID NO: 3474 - protein, 27 aa, Homo sapiens
NPDILVGENDLTALSYLHEPAVLHNLK

SEQ ID NO: 3475 - protein, 9 aa, Homo sapiens
LTNENLDLK

SEQ ID NO: 3476 - protein, 21 aa, Homo sapiens
LLEAQLQAQSLEHEEEVEHLK

SEQ ID NO: 3477 - protein, 9 aa, Homo sapiens
KILEDAHSR

SEQ ID NO: 3478 - protein, 12 aa, Homo sapiens
YDNLRDEMTIIK

SEQ ID NO: 3479 - protein, 16 aa, Homo sapiens
ELVHYQQSPGEDTSLR

SEQ ID NO: 3480 - protein, 14 aa, Homo sapiens
ILNLYTPLNEFEER

SEQ ID NO: 3481 - protein, 9 aa, Homo sapiens
LAHEELEVR

SEQ ID NO: 3482 - protein, 15 aa, Homo sapiens
LEDETILEYPIDVQR

SEQ ID NO: 3483 - protein, 11 aa, Homo sapiens
SVGELYSQCTR

SEQ ID NO: 3484 - protein, 11 aa, Homo sapiens
TMSLQQVINAR

SEQ ID NO: 3485 - protein, 9 aa, Homo sapiens
VVFQADDER

SEQ ID NO: 3486 - protein, 11 aa, Homo sapiens
VWIPDPDEVWR

SEQ ID NO: 3487 - protein, 11 aa, Homo sapiens
YNISQLEEWLR

SEQ ID NO: 3488 - protein, 9 aa, Homo sapiens
QVLIRPCSK

SEQ ID NO: 3489 - protein, 7 aa, Homo sapiens
FLTVMMK

SEQ ID NO: 3490 - protein, 10 aa, Homo sapiens
FDVQLKDLEK

SEQ ID NO: 3491 - protein, 9 aa, Homo sapiens
MNVLADALK

SEQ ID NO: 3492 - protein, 14 aa, Homo sapiens
HGYIGEFEIIDDHR

SEQ ID NO: 3493 - protein, 8 aa, Homo sapiens
IVVNLTGR

SEQ ID NO: 3494 - protein, 20 aa, Homo sapiens
QFGFIVLTTSAGIMDHEEAR

SEQ ID NO: 3495 - protein, 9 aa, Homo sapiens
WQNNLLPSR

SEQ ID NO: 3496 - protein, 7 aa, Homo sapiens
LHYPPGK

SEQ ID NO: 3497 - protein, 13 aa, Homo sapiens
LPEGEALQCLTER

SEQ ID NO: 3498 - protein, 10 aa, Homo sapiens
EKLPSSEVVK

SEQ ID NO: 3499 - protein, 9 aa, Homo sapiens
VQFSLQLFK

SEQ ID NO: 3500 - protein, 12 aa, Homo sapiens
NSNICHYTFQDK

SEQ ID NO: 3501 - protein, 11 aa, Homo sapiens
FNSSVLSFEIK

SEQ ID NO: 3502 - protein, 10 aa, Homo sapiens
FGEYQFLMEK

SEQ ID NO: 3503 - protein, 9 aa, Homo sapiens
KTNLIVDSR

SEQ ID NO: 3504 - protein, 8 aa, Homo sapiens
TNLIVDSR

SEQ ID NO: 3505 - protein, 17 aa, Homo sapiens
YFATVSGSASEANVEEK

SEQ ID NO: 3506 - protein, 20 aa, Homo sapiens
YKQETEQLVSNLKEENTLLK

SEQ ID NO: 3507 - protein, 14 aa, Homo sapiens
LTNLEGIYNSETEK

SEQ ID NO: 3508 - protein, 14 aa, Homo sapiens
QGGSPVIEGVDDAK

SEQ ID NO: 3509 - protein, 11 aa, Homo sapiens
NKDTVFEEQIK

SEQ ID NO: 3510 - protein, 14 aa, Homo sapiens
LATATETYIKPISK

SEQ ID NO: 3511 - protein, 12 aa, Homo sapiens
LGILDLLDEECK

SEQ ID NO: 3512 - protein, 11 aa, Homo sapiens
MLPELFQDDEK

SEQ ID NO: 3513 - protein, 14 aa, Homo sapiens
NQSIIVSGESGAGK

SEQ ID NO: 3514 - protein, 15 aa, Homo sapiens
VLASNPIMESIGNAK

SEQ ID NO: 3515 - protein, 11 aa, Homo sapiens
GAELEYESLKR

SEQ ID NO: 3516 - protein, 10 aa, Homo sapiens
VLSLQEEIAK

SEQ ID NO: 3517 - protein, 15 aa, Homo sapiens
NTMTDSTILLEDVQK

SEQ ID NO: 3518 - protein, 9 aa, Homo sapiens
NLILELKPR

SEQ ID NO: 3519 - protein, 10 aa, Homo sapiens
LLESQLQSQK

SEQ ID NO: 3520 - protein, 16 aa, Homo sapiens
ETLEPLIQAAQLLQVK

SEQ ID NO: 3521 - protein, 9 aa, Homo sapiens
AGQVAYLEK

SEQ ID NO: 3522 - protein, 13 aa, Homo sapiens
DKGEIAQAYIGLK

SEQ ID NO: 3523 - protein, 11 aa, Homo sapiens
KVPLDMSLFLK

SEQ ID NO: 3524 - protein, 10 aa, Homo sapiens
HADYLNDDQK

SEQ ID NO: 3525 - protein, 11 aa, Homo sapiens
SLLTSTINSIK

SEQ ID NO: 3526 - protein, 8 aa, Homo sapiens
KEEVLILR

SEQ ID NO: 3527 - protein, 8 aa, Homo sapiens
LYNTHLNK

SEQ ID NO: 3528 - protein, 12 aa, Homo sapiens
AISPTSATSSGR

SEQ ID NO: 3529 - protein, 16 aa, Homo sapiens
GDDFETVSFWLSNTCR

SEQ ID NO: 3530 - protein, 11 aa, Homo sapiens
IEASLQHEITR

SEQ ID NO: 3531 - protein, 29 aa, Homo sapiens
IGELEVGQMENISPGQIIDEPIRPVNIPR

SEQ ID NO: 3532 - protein, 18 aa, Homo sapiens
QACTLLGISESHQMGIFR

SEQ ID NO: 3533 - protein, 15 aa, Homo sapiens
QNEHCLTNFDLAEYR

SEQ ID NO: 3534 - protein, 14 aa, Homo sapiens
SAPEVTAPGAPAYR

SEQ ID NO: 3535 - protein, 17 aa, Homo sapiens
TSSIADEGTYTLDSILR

SEQ ID NO: 3536 - protein, 14 aa, Homo sapiens
VLNLYTPVNEFEER

SEQ ID NO: 3537 - protein, 9 aa, Homo sapiens
WTYQEFFSR

SEQ ID NO: 3538 - protein, 11 aa, Homo sapiens
YNVSQLEEWLR

SEQ ID NO: 3539 - protein, 10 aa, Homo sapiens
YQNLLNEFSR

SEQ ID NO: 3540 - protein, 11 aa, Homo sapiens
SFSTLFLETVK

SEQ ID NO: 3541 - protein, 12 aa, Homo sapiens
LVPEEVTSTVTK

SEQ ID NO: 3542 - protein, 16 aa, Homo sapiens
HSHKPHPVETSQPSDK

SEQ ID NO: 3543 - protein, 11 aa, Homo sapiens
LVLPSNTPNVR

SEQ ID NO: 3544 - protein, 18 aa, Homo sapiens
TVLDTSYALIGETVNNYR

SEQ ID NO: 3545 - protein, 13 aa, Homo sapiens
ESQAKDVIEEYFK

SEQ ID NO: 3546 - protein, 9 aa, Homo sapiens
LGEWVGLCK

SEQ ID NO: 3547 - protein, 22 aa, Homo sapiens
AEEGIAAGGVMDVNTALQEVLK

SEQ ID NO: 3548 - protein, 11 aa, Homo sapiens
KVVGCSCVVVK

SEQ ID NO: 3549 - protein, 18 aa, Homo sapiens
QAHLCVLASNCDEPMYVK

SEQ ID NO: 3550 - protein, 15 aa, Homo sapiens
LVEALCAEHQINLIK

SEQ ID NO: 3551 - protein, 8 aa, Homo sapiens
DVIEEYFK

SEQ ID NO: 3552 - protein, 10 aa, Homo sapiens
TALIHDGLAR

SEQ ID NO: 3553 - protein, 12 aa, Homo sapiens
GRPHVKPTNYDK

SEQ ID NO: 3554 - protein, 18 aa, Homo sapiens
ISEMLLGPVPPSFAFLPK

SEQ ID NO: 3555 - protein, 13 aa, Homo sapiens
GALLKPWLFTEIK

SEQ ID NO: 3556 - protein, 18 aa, Homo sapiens
ETEVGDPAGNELAEPEAK

SEQ ID NO: 3557 - protein, 13 aa, Homo sapiens
YGEGDSLTLQQLK

SEQ ID NO: 3558 - protein, 20 aa, Homo sapiens
IGSSELQEFCPTILQQLDSR

SEQ ID NO: 3559 - protein, 17 aa, Homo sapiens
LPVGGFADLMGSNGPQK

SEQ ID NO: 3560 - protein, 15 aa, Homo sapiens
FIYGNQDLFATSQSK

SEQ ID NO: 3561 - protein, 12 aa, Homo sapiens
FIDTGFSLPFYK

SEQ ID NO: 3562 - protein, 8 aa, Homo sapiens
VWSHQTLK

SEQ ID NO: 3563 - protein, 9 aa, Homo sapiens
IYYVDHFTR

SEQ ID NO: 3564 - protein, 17 aa, Homo sapiens
PLNPVTQAPLPPGWEQR

SEQ ID NO: 3565 - protein, 14 aa, Homo sapiens
RLEEEEAAAEKEDR

SEQ ID NO: 3566 - protein, 13 aa, Homo sapiens
GSDVASAQLPNFR

SEQ ID NO: 3567 - protein, 20 aa, Homo sapiens
HQDLQFAGLLNPLDSPHHMR

SEQ ID NO: 3568 - protein, 12 aa, Homo sapiens
ILQYLECPQYLR

SEQ ID NO: 3569 - protein, 9 aa, Homo sapiens
TYLAGQIAR

SEQ ID NO: 3570 - protein, 9 aa, Homo sapiens
KYGNANVWK

SEQ ID NO: 3571 - protein, 15 aa, Homo sapiens
QITQVYGFYDECLRK

SEQ ID NO: 3572 - protein, 15 aa, Homo sapiens
CGNQAAIMELDDTLK

SEQ ID NO: 3573 - protein, 13 aa, Homo sapiens
ELDQWIEQLNECK

SEQ ID NO: 3574 - protein, 8 aa, Homo sapiens
YGNANVWK

SEQ ID NO: 3575 - protein, 15 aa, Homo sapiens
AHQLVMEGYNWCHDR

SEQ ID NO: 3576 - protein, 8 aa, Homo sapiens
GGWGISPR

SEQ ID NO: 3577 - protein, 21 aa, Homo sapiens
LQEVPHEGPMCDLLWSDPDDR

SEQ ID NO: 3578 - protein, 14 aa, Homo sapiens
NVVTIFSAPNYCYR

SEQ ID NO: 3579 - protein, 14 aa, Homo sapiens
QITQVYGFYDECLR

SEQ ID NO: 3580 - protein, 15 aa, Homo sapiens
SPDTNYLFMGDYVDR

SEQ ID NO: 3581 - protein, 11 aa, Homo sapiens
YSFLQFDPAPR

SEQ ID NO: 3582 - protein, 12 aa, Homo sapiens
ANEVLENLTQGK

SEQ ID NO: 3583 - protein, 14 aa, Homo sapiens
QFQAFGDLFDEAIK

SEQ ID NO: 3584 - protein, 16 aa, Homo sapiens
LTAGLKPGQDANLTQK

SEQ ID NO: 3585 - protein, 24 aa, Homo sapiens
AALLSPGDPAIWAGLMAACHADDK

SEQ ID NO: 3586 - protein, 10 aa, Homo sapiens
LALVNNTQPK

SEQ ID NO: 3587 - protein, 10 aa, Homo sapiens
LLCSTGEYDK

SEQ ID NO: 3588 - protein, 10 aa, Homo sapiens
VAAIQQILGK

SEQ ID NO: 3589 - protein, 8 aa, Homo sapiens
HFIQSLSK

SEQ ID NO: 3590 - protein, 10 aa, Homo sapiens
LLDLYESVDK

SEQ ID NO: 3591 - protein, 14 aa, Homo sapiens
ASELNPESIYSVFK

SEQ ID NO: 3592 - protein, 21 aa, Homo sapiens
AAELEPDQLLAWQGLANLYEK

SEQ ID NO: 3593 - protein, 8 aa, Homo sapiens
AALNELLK

SEQ ID NO: 3594 - protein, 9 aa, Homo sapiens
VVYQPGYPK

SEQ ID NO: 3595 - protein, 11 aa, Homo sapiens
FFENYNQSLEK

SEQ ID NO: 3596 - protein, 18 aa, Homo sapiens
TLDQISDADNIPGLLVLK

SEQ ID NO: 3597 - protein, 16 aa, Homo sapiens
AGQHSQAVADLQAALR

SEQ ID NO: 3598 - protein, 12 aa, Homo sapiens
ALEYFTCALQHR

SEQ ID NO: 3599 - protein, 17 aa, Homo sapiens
AVHSNPGDPALWSLLSR

SEQ ID NO: 3600 - protein, 13 aa, Homo sapiens
CLLTSAIYALQGR

SEQ ID NO: 3601 - protein, 15 aa, Homo sapiens
DFNCWESLGEAYLSR

SEQ ID NO: 3602 - protein, 15 aa, Homo sapiens
IVDNLGASGNSLYQR

SEQ ID NO: 3603 - protein, 17 aa, Homo sapiens
LMSTSNTWCDLGINYYR

SEQ ID NO: 3604 - protein, 8 aa, Homo sapiens
SLQLASQR

SEQ ID NO: 3605 - protein, 13 aa, Homo sapiens
SNPDQPAVILLLR

SEQ ID NO: 3606 - protein, 15 aa, Homo sapiens
WSLSQAVTGLIDTGR

SEQ ID NO: 3607 - protein, 21 aa, Homo sapiens
LVVDLTDIDPDVAYSSVPYEK

SEQ ID NO: 3608 - protein, 15 aa, Homo sapiens
SSALQWLTPEQTSGK

SEQ ID NO: 3609 - protein, 16 aa, Homo sapiens
FQEHIIQAPKPVEAIK

SEQ ID NO: 3610 - protein, 8 aa, Homo sapiens
ELCELKPK

SEQ ID NO: 3611 - protein, 25 aa, Homo sapiens
FDPETNSDDACTYHPGVPVFHDALK

SEQ ID NO: 3612 - protein, 8 aa, Homo sapiens
LWGVIDVK

SEQ ID NO: 3613 - protein, 14 aa, Homo sapiens
RPSPDEPMTNLELK

SEQ ID NO: 3614 - protein, 15 aa, Homo sapiens
TTDFSDFLSIVGCTK

SEQ ID NO: 3615 - protein, 16 aa, Homo sapiens
KAEPMQWASLELPAAK

SEQ ID NO: 3616 - protein, 10 aa, Homo sapiens
FQEHIIQAPK

SEQ ID NO: 3617 - protein, 8 aa, Homo sapiens
NSLPELSR

SEQ ID NO: 3618 - protein, 11 aa, Homo sapiens
SAFNLLHLVTK

SEQ ID NO: 3619 - protein, 9 aa, Homo sapiens
VVFSQQELR

SEQ ID NO: 3620 - protein, 15 aa, Homo sapiens
MDFKEDLSGIAEMFK

SEQ ID NO: 3621 - protein, 11 aa, Homo sapiens
EDLSGIAEMFK

SEQ ID NO: 3622 - protein, 11 aa, Homo sapiens
SLVMHTPPVLK

SEQ ID NO: 3623 - protein, 12 aa, Homo sapiens
SQHDILQMICSK

SEQ ID NO: 3624 - protein, 16 aa, Homo sapiens
CMPAPEEIVEELPASK

SEQ ID NO: 3625 - protein, 12 aa, Homo sapiens
VEVKEELLAVGK

SEQ ID NO: 3626 - protein, 11 aa, Homo sapiens
AEALEDLVGFK

SEQ ID NO: 3627 - protein, 17 aa, Homo sapiens
ELFQTPVCTDKPTTHEK

SEQ ID NO: 3628 - protein, 21 aa, Homo sapiens
SEVPEDLAGFIELFQTPSHTK

SEQ ID NO: 3629 - protein, 17 aa, Homo sapiens
VEDAADSATKPENLSSK

SEQ ID NO: 3630 - protein, 12 aa, Homo sapiens
VGVKEELLAVGK

SEQ ID NO: 3631 - protein, 32 aa, Homo sapiens
QFQGTDSGEEPLLPTSESFGGNVFFSAQNAAK

SEQ ID NO: 3632 - protein, 20 aa, Homo sapiens
LTQTSGETTHTHTEPTGDGK

SEQ ID NO: 3633 - protein, 12 aa, Homo sapiens
NIYAFMGTPVQK

SEQ ID NO: 3634 - protein, 12 aa, Homo sapiens
KVDVEEEFFALR

SEQ ID NO: 3635 - protein, 17 aa, Homo sapiens
SQPDPVDTPTSSKPQSK

SEQ ID NO: 3636 - protein, 9 aa, Homo sapiens
SSEPVVIMK

SEQ ID NO: 3637 - protein, 14 aa, Homo sapiens
SSQPDPDKNPASSK

SEQ ID NO: 3638 - protein, 10 aa, Homo sapiens
DIVEELSALK

SEQ ID NO: 3639 - protein, 11 aa, Homo sapiens
SNTSLPPLPFK

SEQ ID NO: 3640 - protein, 12 aa, Homo sapiens
KADVEEESLALR

SEQ ID NO: 3641 - protein, 13 aa, Homo sapiens
AMDTPKPAVSDEK

SEQ ID NO: 3642 - protein, 11 aa, Homo sapiens
LDLTENLTGSK

SEQ ID NO: 3643 - protein, 12 aa, Homo sapiens
KADVEEEFLAFR

SEQ ID NO: 3644 - protein, 9 aa, Homo sapiens
ALEDLAGFK

SEQ ID NO: 3645 - protein, 28 aa, Homo sapiens
ESAQAIEDLAGFKDPAAGHTEESMTDDK

SEQ ID NO: 3646 - protein, 23 aa, Homo sapiens
GKSEVPEDLAGFIELFQTPSHTK

SEQ ID NO: 3647 - protein, 8 aa, Homo sapiens
SPQPESFK

SEQ ID NO: 3648 - protein, 18 aa, Homo sapiens
IPCDSPQSDPVDTPTSTK

SEQ ID NO: 3649 - protein, 12 aa, Homo sapiens
SGASEANLIVAK

SEQ ID NO: 3650 - protein, 9 aa, Homo sapiens
ALEDLVDFK

SEQ ID NO: 3651 - protein, 18 aa, Homo sapiens
ASQPDLVDTPTSSKPQPK

SEQ ID NO: 3652 - protein, 12 aa, Homo sapiens
KKPNPVEEEPSR

SEQ ID NO: 3653 - protein, 24 aa, Homo sapiens
ELFQTPGHTEESMTDDKITEVSCK

SEQ ID NO: 3654 - protein, 12 aa, Homo sapiens
VGVKEEVLPVGK

SEQ ID NO: 3655 - protein, 19 aa, Homo sapiens
AAVGEEKDINTFVGTPVEK

SEQ ID NO: 3656 - protein, 13 aa, Homo sapiens
EKAEALEDLVGFK

SEQ ID NO: 3657 - protein, 17 aa, Homo sapiens
ELFQTPICTDKPTTHEK

SEQ ID NO: 3658 - protein, 11 aa, Homo sapiens
SQPAASTLESK

SEQ ID NO: 3659 - protein, 12 aa, Homo sapiens
DINTFLGTPVQK

SEQ ID NO: 3660 - protein, 11 aa, Homo sapiens
LDLAGTLPGSK

SEQ ID NO: 3661 - protein, 12 aa, Homo sapiens
GQNLLQTQDHAK

SEQ ID NO: 3662 - protein, 14 aa, Homo sapiens
SPQPDPVDTPASTK

SEQ ID NO: 3663 - protein, 14 aa, Homo sapiens
GKGEAGNSDSMCLR

SEQ ID NO: 3664 - protein, 17 aa, Homo sapiens
ELFQTPGPSEESMTDEK

SEQ ID NO: 3665 - protein, 14 aa, Homo sapiens
SEETNTEIVECILK

SEQ ID NO: 3666 - protein, 16 aa, Homo sapiens
ELFQTPGTDKPTTDEK

SEQ ID NO: 3667 - protein, 8 aa, Homo sapiens
KNESPFWK

SEQ ID NO: 3668 - protein, 12 aa, Homo sapiens
KADVEGELLACR

SEQ ID NO: 3669 - protein, 14 aa, Homo sapiens
SPPPELTDTATSTK

SEQ ID NO: 3670 - protein, 12 aa, Homo sapiens
KADVEEEFLALR

SEQ ID NO: 3671 - protein, 9 aa, Homo sapiens
AFMGTPVQK

SEQ ID NO: 3672 - protein, 18 aa, Homo sapiens
IPCESPPLEVVDTTASTK

SEQ ID NO: 3673 - protein, 11 aa, Homo sapiens
AQALEDLAGFK

SEQ ID NO: 3674 - protein, 13 aa, Homo sapiens
QILDSAASLTGSK

SEQ ID NO: 3675 - protein, 11 aa, Homo sapiens
LDLLGNLPGSK

SEQ ID NO: 3676 - protein, 11 aa, Homo sapiens
LDLPGNLPGSK

SEQ ID NO: 3677 - protein, 18 aa, Homo sapiens
MPCQSLQPEPINTPTHTK

SEQ ID NO: 3678 - protein, 18 aa, Homo sapiens
SPQPDPVGTPTIFKPQSK

SEQ ID NO: 3679 - protein, 16 aa, Homo sapiens
ELFQTPCTDNPTTDEK

SEQ ID NO: 3680 - protein, 12 aa, Homo sapiens
DINTFVGTPVEK

SEQ ID NO: 3681 - protein, 11 aa, Homo sapiens
AQPLEDLAGLK

SEQ ID NO: 3682 - protein, 13 aa, Homo sapiens
EEAQALEDLTGFK

SEQ ID NO: 3683 - protein, 13 aa, Homo sapiens
EEAQSLEDLAGFK

SEQ ID NO: 3684 - protein, 17 aa, Homo sapiens
ELFSAPGHTEESMTIDK

SEQ ID NO: 3685 - protein, 12 aa, Homo sapiens
NINTFVETPVQK

SEQ ID NO: 3686 - protein, 10 aa, Homo sapiens
VLNNFISNQK

SEQ ID NO: 3687 - protein, 12 aa, Homo sapiens
KADTEEEFLAFR

SEQ ID NO: 3688 - protein, 17 aa, Homo sapiens
TSGETTQTHTEPTGDSK

SEQ ID NO: 3689 - protein, 17 aa, Homo sapiens
ELFQTPGHTEELVAAGK

SEQ ID NO: 3690 - protein, 11 aa, Homo sapiens
KLDAEDVIGSR

SEQ ID NO: 3691 - protein, 14 aa, Homo sapiens
SPQSDPADTPTNTK

SEQ ID NO: 3692 - protein, 14 aa, Homo sapiens
RIEPAEELNSNDMK

SEQ ID NO: 3693 - protein, 12 aa, Homo sapiens
QESGSEIHVEVK

SEQ ID NO: 3694 - protein, 17 aa, Homo sapiens
ELFQTPGHTEEAVAAGK

SEQ ID NO: 3695 - protein, 9 aa, Homo sapiens
LQDSVPENK

SEQ ID NO: 3696 - protein, 11 aa, Homo sapiens
ADTEEEFLAFR

SEQ ID NO: 3697 - protein, 11 aa, Homo sapiens
ADVEEEFLAFR

SEQ ID NO: 3698 - protein, 11 aa, Homo sapiens
AQALEELTGFR

SEQ ID NO: 3699 - protein, 14 aa, Homo sapiens
AQSLVISPPAPSPR

SEQ ID NO: 3700 - protein, 8 aa, Homo sapiens
ENVLQYCR

SEQ ID NO: 3701 - protein, 16 aa, Homo sapiens
ESADGLQGETQLLVSR

SEQ ID NO: 3702 - protein, 7 aa, Homo sapiens
GIECDIR

SEQ ID NO: 3703 - protein, 31 aa, Homo sapiens
GSIPTDVEVLPTETEIHNEPFLTLWLTQVER

SEQ ID NO: 3704 - protein, 10 aa, Homo sapiens
HGDVITIIDR

SEQ ID NO: 3705 - protein, 12 aa, Homo sapiens
LDQPGNLPGSNR

SEQ ID NO: 3706 - protein, 18 aa, Homo sapiens
MPCESSPPESADTPTSTR

SEQ ID NO: 3707 - protein, 13 aa, Homo sapiens
QILDPAASVTGSR

SEQ ID NO: 3708 - protein, 14 aa, Homo sapiens
QMLDPANYGTGMER

SEQ ID NO: 3709 - protein, 13 aa, Homo sapiens
QTPAPAASVTGSR

SEQ ID NO: 3710 - protein, 19 aa, Homo sapiens
SGVDGPHFPLSLSTCLFGR

SEQ ID NO: 3711 - protein, 16 aa, Homo sapiens
TEAEQQITEVFVLAER

SEQ ID NO: 3712 - protein, 15 aa, Homo sapiens
TSPEMDIQNPDDGAR

SEQ ID NO: 3713 - protein, 11 aa, Homo sapiens
VEPVGDVVSTR

SEQ ID NO: 3714 - protein, 9 aa, Homo sapiens
VHVPARPYR

SEQ ID NO: 3715 - protein, 19 aa, Homo sapiens
SIQTPQSHGTLTAELWDNK

SEQ ID NO: 3716 - protein, 12 aa, Homo sapiens
STTTSDPPNICK

SEQ ID NO: 3717 - protein, 17 aa, Homo sapiens
LPSAQTPNGTDYVASGK

SEQ ID NO: 3718 - protein, 19 aa, Homo sapiens
MEDTLVNNVPLPNTLPLPK

SEQ ID NO: 3719 - protein, 12 aa, Homo sapiens
EKELEKEQEQER

SEQ ID NO: 3720 - protein, 17 aa, Homo sapiens
GLIPAGTQHSMIATTGK

SEQ ID NO: 3721 - protein, 11 aa, Homo sapiens
QQVADEDEIWK

SEQ ID NO: 3722 - protein, 17 aa, Homo sapiens
QESENSCNKEEEPVFTR

SEQ ID NO: 3723 - protein, 32 aa, Homo sapiens
AAGSPSSSDQDEKLPGQDESTAGTSEQNDILK

SEQ ID NO: 3724 - protein, 11 aa, Homo sapiens
YATLSLFNTYK

SEQ ID NO: 3725 - protein, 21 aa, Homo sapiens
VKDAQQVEPEGQEKPSPATVR

SEQ ID NO: 3726 - protein, 10 aa, Homo sapiens
LPDLSPVENK

SEQ ID NO: 3727 - protein, 13 aa, Homo sapiens
TVNQQTMAAPVVK

SEQ ID NO: 3728 - protein, 8 aa, Homo sapiens
HGLQSLGK

SEQ ID NO: 3729 - protein, 12 aa, Homo sapiens
RHEQFIPIAADK

SEQ ID NO: 3730 - protein, 8 aa, Homo sapiens
LLEKPYVR

SEQ ID NO: 3731 - protein, 9 aa, Homo sapiens
PAVLSGYFK

SEQ ID NO: 3732 - protein, 20 aa, Homo sapiens
MLWGSDPYPHAEPQQATTPK

SEQ ID NO: 3733 - protein, 13 aa, Homo sapiens
SSSQIPAQPSVAK

SEQ ID NO: 3734 - protein, 14 aa, Homo sapiens
PGVAAPPEVAPAPK

SEQ ID NO: 3735 - protein, 26 aa, Homo sapiens
SEAALDQEQITAAYSVEHNQLEAHPK

SEQ ID NO: 3736 - protein, 11 aa, Homo sapiens
NADLNAQTVVK

SEQ ID NO: 3737 - protein, 11 aa, Homo sapiens
EPIERPEEKPK

SEQ ID NO: 3738 - protein, 10 aa, Homo sapiens
AEHIPSGPLR

SEQ ID NO: 3739 - protein, 10 aa, Homo sapiens
DHAISLSEPR

SEQ ID NO: 3740 - protein, 18 aa, Homo sapiens
DQMEGSPNSSESFEHIAR

SEQ ID NO: 3741 - protein, 18 aa, Homo sapiens
EATPVVHETEPESGSQPR

SEQ ID NO: 3742 - protein, 9 aa, Homo sapiens
PAQVSQPFR

SEQ ID NO: 3743 - protein, 11 aa, Homo sapiens
QQSEISAAVER

SEQ ID NO: 3744 - protein, 10 aa, Homo sapiens
SFSSQRPVDR

SEQ ID NO: 3745 - protein, 9 aa, Homo sapiens
TLSAPQEER

SEQ ID NO: 3746 - protein, 11 aa, Homo sapiens
GGILTSTGFYK

SEQ ID NO: 3747 - protein, 10 aa, Homo sapiens
VAIESAVQQK

SEQ ID NO: 3748 - protein, 23 aa, Homo sapiens
IPQNPSPHTHQQQNAPVTVIQSK

SEQ ID NO: 3749 - protein, 21 aa, Homo sapiens
AIPLPIQMYYQQQPVSTSVVR

SEQ ID NO: 3750 - protein, 14 aa, Homo sapiens
NQWGEIVEEFNFPR

SEQ ID NO: 3751 - protein, 31 aa, Homo sapiens
TPVANQSSNLTATQMSFPVQGVHTVAQTVSR

SEQ ID NO: 3752 - protein, 21 aa, Homo sapiens
RGIGGIFFDDLDSPSKEEVFR

SEQ ID NO: 3753 - protein, 19 aa, Homo sapiens
KEGGGGISCVLQDGCVFEK

SEQ ID NO: 3754 - protein, 18 aa, Homo sapiens
EGGGGISCVLQDGCVFEK

SEQ ID NO: 3755 - protein, 20 aa, Homo sapiens
GIGGIFFDDLDSPSKEEVFR

SEQ ID NO: 3756 - protein, 11 aa, Homo sapiens
AVVPSYIPLVK

SEQ ID NO: 3757 - protein, 12 aa, Homo sapiens
WEYMHSPSENSK

SEQ ID NO: 3758 - protein, 15 aa, Homo sapiens
LPFCAMGVSSVIHPK

SEQ ID NO: 3759 - protein, 13 aa, Homo sapiens
EACDQHGPDLYPK

SEQ ID NO: 3760 - protein, 11 aa, Homo sapiens
HCDDSFTPQEK

SEQ ID NO: 3761 - protein, 18 aa, Homo sapiens
AGVSISVVHGNLSEEAAK

SEQ ID NO: 3762 - protein, 17 aa, Homo sapiens
ATSLGRPEEEEDELAHR

SEQ ID NO: 3763 - protein, 9 aa, Homo sapiens
FGLFTPGSR

SEQ ID NO: 3764 - protein, 7 aa, Homo sapiens
FVQSCAR

SEQ ID NO: 3765 - protein, 13 aa, Homo sapiens
IESILMSLPLTAR

SEQ ID NO: 3766 - protein, 12 aa, Homo sapiens
NPHAPTIHFNYR

SEQ ID NO: 3767 - protein, 11 aa, Homo sapiens
WCDDYFFIAHR

SEQ ID NO: 3768 - protein, 10 aa, Homo sapiens
YVEFNLLYDR

SEQ ID NO: 3769 - protein, 24 aa, Homo sapiens
TDPFIFPECPHVYFCGNTPSFGSK

SEQ ID NO: 3770 - protein, 17 aa, Homo sapiens
HISPTAPDTLGCYPFYK

SEQ ID NO: 3771 - protein, 14 aa, Homo sapiens
EVSEEHNLLPQPPR

SEQ ID NO: 3772 - protein, 14 aa, Homo sapiens
FLGTSGQNVSDIFR

SEQ ID NO: 3773 - protein, 15 aa, Homo sapiens
VILAGNLLSHSTQSR

SEQ ID NO: 3774 - protein, 14 aa, Homo sapiens
VPVATYTNSSQPFR

SEQ ID NO: 3775 - protein, 16 aa, Homo sapiens
YIHPDDELVLEDELQR

SEQ ID NO: 3776 - protein, 12 aa, Homo sapiens
AQEAAATQLGLK

SEQ ID NO: 3777 - protein, 31 aa, Homo sapiens
DSSLEADHVISAIPASVLSELLPAEAAPLAR

SEQ ID NO: 3778 - protein, 17 aa, Homo sapiens
GGLEMLPQALETHLTSR

SEQ ID NO: 3779 - protein, 11 aa, Homo sapiens
GIRPAGALGAR

SEQ ID NO: 3780 - protein, 8 aa, Homo sapiens
PLFWAGLR

SEQ ID NO: 3781 - protein, 14 aa, Homo sapiens
SCFPSLFQAEQTHR

SEQ ID NO: 3782 - protein, 10 aa, Homo sapiens
TPQPDSALIR

SEQ ID NO: 3783 - protein, 11 aa, Homo sapiens
VICCTEDMLEK

SEQ ID NO: 3784 - protein, 13 aa, Homo sapiens
GSLQILDQLLLPK

SEQ ID NO: 3785 - protein, 18 aa, Homo sapiens
HHGIPFYVAAPSSSCDLR

SEQ ID NO: 3786 - protein, 8 aa, Homo sapiens
SIGDLGAR

SEQ ID NO: 3787 - protein, 10 aa, Homo sapiens
TALTTTISSR

SEQ ID NO: 3788 - protein, 15 aa, Homo sapiens
YEAVGSVHQAWEAIR

SEQ ID NO: 3789 - protein, 13 aa, Homo sapiens
EKEPVVVETVEEK

SEQ ID NO: 3790 - protein, 16 aa, Homo sapiens
SKFDELSASNLPPNLK

SEQ ID NO: 3791 - protein, 11 aa, Homo sapiens
KEPILVCPPLR

SEQ ID NO: 3792 - protein, 11 aa, Homo sapiens
AYTPPEDLQSR

SEQ ID NO: 3793 - protein, 13 aa, Homo sapiens
DVLDFYNVPIQDR

SEQ ID NO: 3794 - protein, 20 aa, Homo sapiens
EVFGSSLPSNWQDISLEDSR

SEQ ID NO: 3795 - protein, 19 aa, Homo sapiens
FNLLAHLADDLGHVVPNSR

SEQ ID NO: 3796 - protein, 15 aa, Homo sapiens
VRDVLDFYNVPIQDR

SEQ ID NO: 3797 - protein, 23 aa, Homo sapiens
VNAVNPTVVMTSMGQATWSDPHK

SEQ ID NO: 3798 - protein, 12 aa, Homo sapiens
AVTNHSVYCSTK

SEQ ID NO: 3799 - protein, 8 aa, Homo sapiens
GALDMLTK

SEQ ID NO: 3800 - protein, 9 aa, Homo sapiens
RVLVTGAGK

SEQ ID NO: 3801 - protein, 10 aa, Homo sapiens
VMALELGPHK

SEQ ID NO: 3802 - protein, 11 aa, Homo sapiens
AVIQVSQIVAR

SEQ ID NO: 3803 - protein, 20 aa, Homo sapiens
ECPGIEPVCVDLGDWEATER

SEQ ID NO: 3804 - protein, 18 aa, Homo sapiens
FAEVEHVVNAILFLLSDR

SEQ ID NO: 3805 - protein, 12 aa, Homo sapiens
GTVQALHATGAR

SEQ ID NO: 3806 - protein, 16 aa, Homo sapiens
GVPGAIVNVSSQCSQR

SEQ ID NO: 3807 - protein, 8 aa, Homo sapiens
MELFLAGR

SEQ ID NO: 3808 - protein, 7 aa, Homo sapiens
SFEVNLR

SEQ ID NO: 3809 - protein, 10 aa, Homo sapiens
TQADLDSLVR

SEQ ID NO: 3810 - protein, 12 aa, Homo sapiens
MLYDIVPVVSFK

SEQ ID NO: 3811 - protein, 17 aa, Homo sapiens
VLEVQPEKLELIMDEMK

SEQ ID NO: 3812 - protein, 12 aa, Homo sapiens
VFLDFFTYAPPK

SEQ ID NO: 3813 - protein, 25 aa, Homo sapiens
ELLESISPALLSYLQEHAQEVVLDK

SEQ ID NO: 3814 - protein, 16 aa, Homo sapiens
NMLTEELYGNTFQLYK

SEQ ID NO: 3815 - protein, 14 aa, Homo sapiens
EAVVYLAHTHDGAR

SEQ ID NO: 3816 - protein, 8 aa, Homo sapiens
TNYDIVVR

SEQ ID NO: 3817 - protein, 22 aa, Homo sapiens
LAAQENRPVTDHLDEQAVQGLK

SEQ ID NO: 3818 - protein, 16 aa, Homo sapiens
AVTHTSPEDVSFAESR

SEQ ID NO: 3819 - protein, 8 aa, Homo sapiens
DHEAWETR

SEQ ID NO: 3820 - protein, 17 aa, Homo sapiens
GDTVIDGWQWLINDTLR

SEQ ID NO: 3821 - protein, 9 aa, Homo sapiens
ISHWDGVIR

SEQ ID NO: 3822 - protein, 11 aa, Homo sapiens
ITQLLGLPTYR

SEQ ID NO: 3823 - protein, 13 aa, Homo sapiens
LDGNLLTQPGQAR

SEQ ID NO: 3824 - protein, 17 aa, Homo sapiens
SDVASVNWSAPSQAFPR

SEQ ID NO: 3825 - protein, 11 aa, Homo sapiens
KLSLLCIDFNK

SEQ ID NO: 3826 - protein, 7 aa, Homo sapiens
IVWLQEK

SEQ ID NO: 3827 - protein, 15 aa, Homo sapiens
TSQTVATFLDELAQK

SEQ ID NO: 3828 - protein, 13 aa, Homo sapiens
NILDFPQHVSPSK

SEQ ID NO: 3829 - protein, 9 aa, Homo sapiens
YCVDQNLLK

SEQ ID NO: 3830 - protein, 10 aa, Homo sapiens
FKQEGVLNSK

SEQ ID NO: 3831 - protein, 20 aa, Homo sapiens
VYDQVGTQEFEDVSYESTLK

SEQ ID NO: 3832 - protein, 9 aa, Homo sapiens
YPHYFPLLK

SEQ ID NO: 3833 - protein, 8 aa, Homo sapiens
QDAFLLSK

SEQ ID NO: 3834 - protein, 9 aa, Homo sapiens
KVEEAFNCR

SEQ ID NO: 3835 - protein, 10 aa, Homo sapiens
LSLLCIDFNK

SEQ ID NO: 3836 - protein, 8 aa, Homo sapiens
ELIEQTKR

SEQ ID NO: 3837 - protein, 9 aa, Homo sapiens
DSLRPEAAR

SEQ ID NO: 3838 - protein, 8 aa, Homo sapiens
FYLDLYPR

SEQ ID NO: 3839 - protein, 11 aa, Homo sapiens
LSEFDVEMSMR

SEQ ID NO: 3840 - protein, 10 aa, Homo sapiens
QANTGLFNLR

SEQ ID NO: 3841 - protein, 8 aa, Homo sapiens
RGLPFDGR

SEQ ID NO: 3842 - protein, 17 aa, Homo sapiens
SCILRPGGSEDASAMLR

SEQ ID NO: 3843 - protein, 19 aa, Homo sapiens
VDQALHTQTDADPAEEYAR

SEQ ID NO: 3844 - protein, 8 aa, Homo sapiens
VEEAFNCR

SEQ ID NO: 3845 - protein, 11 aa, Homo sapiens
WDLSAQQIEER

SEQ ID NO: 3846 - protein, 15 aa, Homo sapiens
YGHAACFGLQPGCLR

SEQ ID NO: 3847 - protein, 10 aa, Homo sapiens
YYMNQVEETR

SEQ ID NO: 3848 - protein, 8 aa, Homo sapiens
LGCDRPVK

SEQ ID NO: 3849 - protein, 13 aa, Homo sapiens
SITSDEVNFLVYR

SEQ ID NO: 3850 - protein, 15 aa, Homo sapiens
DAAGSGDKPGADTGR

SEQ ID NO: 3851 - protein, 8 aa, Homo sapiens
VQFCPFEK

SEQ ID NO: 3852 - protein, 7 aa, Homo sapiens
LGLRPVK

SEQ ID NO: 3853 - protein, 10 aa, Homo sapiens
TFLQTVSSEK

SEQ ID NO: 3854 - protein, 18 aa, Homo sapiens
GAHLTALEMLTAFASHIR

SEQ ID NO: 3855 - protein, 17 aa, Homo sapiens
HDGSEPCVDVLFGDGHR

SEQ ID NO: 3856 - protein, 13 aa, Homo sapiens
STNLNCSVIADVR

SEQ ID NO: 3857 - protein, 14 aa, Homo sapiens
EIIELPLKQPELFK

SEQ ID NO: 3858 - protein, 16 aa, Homo sapiens
VLAQLLTEMDGIEQLK

SEQ ID NO: 3859 - protein, 21 aa, Homo sapiens
EIAIDVPNVSWSDIGGLESIK

SEQ ID NO: 3860 - protein, 20 aa, Homo sapiens
GADGMILGGPQSDSDTDAQR

SEQ ID NO: 3861 - protein, 19 aa, Homo sapiens
HFTQALSTVTPRHPESFIR

SEQ ID NO: 3862 - protein, 17 aa, Homo sapiens
IQDWQSMYQSTHIPIPK

SEQ ID NO: 3863 - protein, 10 aa, Homo sapiens
TLMNAVSPLK

SEQ ID NO: 3864 - protein, 10 aa, Homo sapiens
EEMVLDNIPK

SEQ ID NO: 3865 - protein, 16 aa, Homo sapiens
MTELADVFSGVKPLTR

SEQ ID NO: 3866 - protein, 11 aa, Homo sapiens
HLAAALENLNK

SEQ ID NO: 3867 - protein, 15 aa, Homo sapiens
SFEYIQDYVNIYGLK

SEQ ID NO: 3868 - protein, 10 aa, Homo sapiens
VHAQVQQFLK

SEQ ID NO: 3869 - protein, 11 aa, Homo sapiens
ELQNFLSMFQK

SEQ ID NO: 3870 - protein, 13 aa, Homo sapiens
FTPVDESVTFIGR

SEQ ID NO: 3871 - protein, 15 aa, Homo sapiens
IINYNVEQECNNFLR

SEQ ID NO: 3872 - protein, 14 aa, Homo sapiens
IVSCGNAIIAELLR

SEQ ID NO: 3873 - protein, 8 aa, Homo sapiens
IWQEEVSR

SEQ ID NO: 3874 - protein, 11 aa, Homo sapiens
LASALDLPLLR

SEQ ID NO: 3875 - protein, 12 aa, Homo sapiens
LQTHDIIEVPTR

SEQ ID NO: 3876 - protein, 10 aa, Homo sapiens
LSEFIPAVFR

SEQ ID NO: 3877 - protein, 9 aa, Homo sapiens
NENLQAWFR

SEQ ID NO: 3878 - protein, 15 aa, Homo sapiens
VAEAHVPNFIFDEFR

SEQ ID NO: 3879 - protein, 14 aa, Homo sapiens
VPINESFISMVIGR

SEQ ID NO: 3880 - protein, 7 aa, Homo sapiens
YIVDLNR

SEQ ID NO: 3881 - protein, 28 aa, Homo sapiens
ILNHVLQHAEPGNAQSVLEAIDTYCEQK

SEQ ID NO: 3882 - protein, 22 aa, Homo sapiens
GTVLLADNVICPGAPDFLAHVR

SEQ ID NO: 3883 - protein, 16 aa, Homo sapiens
LITIEINPDCAAITQR

SEQ ID NO: 3884 - protein, 15 aa, Homo sapiens
YLPDTLLLEECGLLR

SEQ ID NO: 3885 - protein, 19 aa, Homo sapiens
ACDSVTSNVLPLLLEQFHK

SEQ ID NO: 3886 - protein, 15 aa, Homo sapiens
LPTPVLLPYKPQVIR

SEQ ID NO: 3887 - protein, 25 aa, Homo sapiens
VAALEASGTLAALYPVAFSSHLVPK

SEQ ID NO: 3888 - protein, 19 aa, Homo sapiens
ADAEDLLDSFLSNILQDCR

SEQ ID NO: 3889 - protein, 16 aa, Homo sapiens
AIFQEVHVQSLPQVDR

SEQ ID NO: 3890 - protein, 8 aa, Homo sapiens
AVLASTPR

SEQ ID NO: 3891 - protein, 11 aa, Homo sapiens
DFLPSLWASIR

SEQ ID NO: 3892 - protein, 12 aa, Homo sapiens
FQPFQDGSSGQR

SEQ ID NO: 3893 - protein, 11 aa, Homo sapiens
GEWFLLGSPGS

SEQ ID NO: 3894 - protein, 8 aa, Homo sapiens
GLSHVLNR

SEQ ID NO: 3895 - protein, 18 aa, Homo sapiens
GNMVAQSSDVIAVCQSLR

SEQ ID NO: 3896 - protein, 12 aa, Homo sapiens
HTVYNIITNFMR

SEQ ID NO: 3897 - protein, 8 aa, Homo sapiens
IVHDLISR

SEQ ID NO: 3898 - protein, 11 aa, Homo sapiens
LLQAAAGASAR

SEQ ID NO: 3899 - protein, 7 aa, Homo sapiens
NLLVAFR

SEQ ID NO: 3900 - protein, 23 aa, Homo sapiens
SGNYTVLQVVEALGSSLENPEPR

SEQ ID NO: 3901 - protein, 18 aa, Homo sapiens
VEAEGLAALHSLTACLSR

SEQ ID NO: 3902 - protein, 11 aa, Homo sapiens
HLLSAGDGEVK

SEQ ID NO: 3903 - protein, 16 aa, Homo sapiens
TSLEVPEINALLLVPK

SEQ ID NO: 3904 - protein, 21 aa, Homo sapiens
KPVVTFQAHDGPVYSMVSTDR

SEQ ID NO: 3905 - protein, 19 aa, Homo sapiens
AVPLAVPLGQTEVFQALQR

SEQ ID NO: 3906 - protein, 25 aa, Homo sapiens
ENSLILAGGDCQLHTMDLETGTFTR

SEQ ID NO: 3907 - protein, 12 aa, Homo sapiens
GHTDYIHCLALR

SEQ ID NO: 3908 - protein, 16 aa, Homo sapiens
HVTFYQDLILSAGQGR

SEQ ID NO: 3909 - protein, 14 aa, Homo sapiens
SPEVLSGGEDGAVR

SEQ ID NO: 3910 - protein, 11 aa, Homo sapiens
SSTPTTIFPIR

SEQ ID NO: 3911 - protein, 10 aa, Homo sapiens
VDVFTNLGYR

SEQ ID NO: 3912 - protein, 13 aa, Homo sapiens
EEDGSTCLHHAAK

SEQ ID NO: 3913 - protein, 8 aa, Homo sapiens
ILLGHATK

SEQ ID NO: 3914 - protein, 27 aa, Homo sapiens
AAAAGAAAAAAAEGEAPAEMGALLLEK

SEQ ID NO: 3915 - protein, 19 aa, Homo sapiens
IKADPDGPEAQAEACSGER

SEQ ID NO: 3916 - protein, 10 aa, Homo sapiens
TDLGAAAGSK

SEQ ID NO: 3917 - protein, 9 aa, Homo sapiens
RPTCVIMVK

SEQ ID NO: 3918 - protein, 10 aa, Homo sapiens
NLPYVYIPSK

SEQ ID NO: 3919 - protein, 17 aa, Homo sapiens
ADPDGPEAQAEACSGER

SEQ ID NO: 3920 - protein, 19 aa, Homo sapiens
TYQELLVNQNPIAQPLASR

SEQ ID NO: 3921 - protein, 21 aa, Homo sapiens
DGLALGPGPFVTALEYATDTK

SEQ ID NO: 3922 - protein, 29 aa, Homo sapiens
GIQTSDPNAVVMGLAPEHFHYQILNQAFR

SEQ ID NO: 3923 - protein, 8 aa, Homo sapiens
TFFLEALR

SEQ ID NO: 3924 - protein, 8 aa, Homo sapiens
VPAGLEKR

SEQ ID NO: 3925 - protein, 15 aa, Homo sapiens
LCAAAASILGKPADR

SEQ ID NO: 3926 - protein, 12 aa, Homo sapiens
RLCAAAASILGK

SEQ ID NO: 3927 - protein, 7 aa, Homo sapiens
VPAGLEK

SEQ ID NO: 3928 - protein, 12 aa, Homo sapiens
SHSAHFFEFLTK

SEQ ID NO: 3929 - protein, 16 aa, Homo sapiens
RLCAAAASILGKPADR

SEQ ID NO: 3930 - protein, 20 aa, Homo sapiens
PFLELDTNLPANRVPAGLEK

SEQ ID NO: 3931 - protein, 11 aa, Homo sapiens
FFPLESWQIGK

SEQ ID NO: 3932 - protein, 11 aa, Homo sapiens
LCAAAASILGK

SEQ ID NO: 3933 - protein, 8 aa, Homo sapiens
ELALGQDR

SEQ ID NO: 3934 - protein, 8 aa, Homo sapiens
IGTVMTFL

SEQ ID NO: 3935 - protein, 13 aa, Homo sapiens
PFLELDTNLPANR

SEQ ID NO: 3936 - protein, 7 aa, Homo sapiens
HYWVPAK

SEQ ID NO: 3937 - protein, 16 aa, Homo sapiens
LFGGQIVGQALVAAAK

SEQ ID NO: 3938 - protein, 23 aa, Homo sapiens
IAAQEVPIEIKPVNPSPLSQLQR

SEQ ID NO: 3939 - protein, 18 aa, Homo sapiens
ADHWMLYECESPWAGGSR

SEQ ID NO: 3940 - protein, 9 aa, Homo sapiens
LPVLYQVER

SEQ ID NO: 3941 - protein, 8 aa, Homo sapiens
TGSSFSVR

SEQ ID NO: 3942 - protein, 17 aa, Homo sapiens
HYGNKPIGMGGTFIIQK

SEQ ID NO: 3943 - protein, 21 aa, Homo sapiens
SHIMPAEFSSCPLNSDEEVNK

SEQ ID NO: 3944 - protein, 17 aa, Homo sapiens
IAEVGGVPYLLPLVNQK

SEQ ID NO: 3945 - protein, 12 aa, Homo sapiens
APLVCLPVFVSR

SEQ ID NO: 3946 - protein, 7 aa, Homo sapiens
DPGFDLR

SEQ ID NO: 3947 - protein, 9 aa, Homo sapiens
LEHTHFFSR

SEQ ID NO: 3948 - protein, 11 aa, Homo sapiens
TGPLNFVTCMR

SEQ ID NO: 3949 - protein, 8 aa, Homo sapiens
VQLPAYLK

SEQ ID NO: 3950 - protein, 14 aa, Homo sapiens
VVNEINIEDLCLTK

SEQ ID NO: 3951 - protein, 15 aa, Homo sapiens
HNELTGDNVGPLILK

SEQ ID NO: 3952 - protein, 11 aa, Homo sapiens
TFPACDGSHNK

SEQ ID NO: 3953 - protein, 12 aa, Homo sapiens
LPVPESITGFAR

SEQ ID NO: 3954 - protein, 13 aa, Homo sapiens
RLPVPESITGFAR

SEQ ID NO: 3955 - protein, 7 aa, Homo sapiens
VLESVAR

SEQ ID NO: 3956 - protein, 22 aa, Homo sapiens
QITKEDFATFDYILCMDESNLR

SEQ ID NO: 3957 - protein, 13 aa, Homo sapiens
KLVTDQNISENWR

SEQ ID NO: 3958 - protein, 13 aa, Homo sapiens
AKIELLGSYDPQK

SEQ ID NO: 3959 - protein, 11 aa, Homo sapiens
IELLGSYDPQK

SEQ ID NO: 3960 - protein, 18 aa, Homo sapiens
EDFATFDYILCMDESNLR

SEQ ID NO: 3961 - protein, 10 aa, Homo sapiens
HGIPMSHVAR

SEQ ID NO: 3962 - protein, 12 aa, Homo sapiens
LVTDQNISENWR

SEQ ID NO: 3963 - protein, 24 aa, Homo sapiens
QLIIEDPYYGNDSDFETVYQQCVR

SEQ ID NO: 3964 - protein, 11 aa, Homo sapiens
RHGIPMSHVAR

SEQ ID NO: 3965 - protein, 9 aa, Homo sapiens
SPIAEAVFR

SEQ ID NO: 3966 - protein, 12 aa, Homo sapiens
SVLFVCLGNICR

SEQ ID NO: 3967 - protein, 18 aa, Homo sapiens
VDSAATSGYEIGNPPDYR

SEQ ID NO: 3968 - protein, 15 aa, Homo sapiens
ASSDLEQLCSHVNEK

SEQ ID NO: 3969 - protein, 11 aa, Homo sapiens
LTYNQINDVIK

SEQ ID NO: 3970 - protein, 13 aa, Homo sapiens
QDQISGLSQSEVK

SEQ ID NO: 3971 - protein, 14 aa, Homo sapiens
SLYEDLEDHPNVQK

SEQ ID NO: 3972 - protein, 14 aa, Homo sapiens
GGSVPPQHHPSGPK

SEQ ID NO: 3973 - protein, 16 aa, Homo sapiens
SQMQHFLQQQIIFFQK

SEQ ID NO: 3974 - protein, 12 aa, Homo sapiens
FPVISVPHLPEK

SEQ ID NO: 3975 - protein, 17 aa, Homo sapiens
APEPGPAGDGGPGAPAR

SEQ ID NO: 3976 - protein, 12 aa, Homo sapiens
GLFPASYVQVIR

SEQ ID NO: 3977 - protein, 12 aa, Homo sapiens
LVPTHTQVPVHR

SEQ ID NO: 3978 - protein, 10 aa, Homo sapiens
SENPGEISLR

SEQ ID NO: 3979 - protein, 13 aa, Homo sapiens
DIISELLTSDDMK

SEQ ID NO: 3980 - protein, 15 aa, Homo sapiens
LGIPQNTILVQTLLR

SEQ ID NO: 3981 - protein, 13 aa, Homo sapiens
YLLDHFLSMGINK

SEQ ID NO: 3982 - protein, 17 aa, Homo sapiens
AGEGNEEISNMIHSYIK

SEQ ID NO: 3983 - protein, 14 aa, Homo sapiens
VCPQIDADNATDNK

SEQ ID NO: 3984 - protein, 17 aa, Homo sapiens
DQVLQNLGSVESYSEEK

SEQ ID NO: 3985 - protein, 10 aa, Homo sapiens
LIDELENSQK

SEQ ID NO: 3986 - protein, 10 aa, Homo sapiens
AMQETVDALR

SEQ ID NO: 3987 - protein, 9 aa, Homo sapiens
ASQQINALR

SEQ ID NO: 3988 - protein, 15 aa, Homo sapiens
ITQLVSDQANHVLAR

SEQ ID NO: 3989 - protein, 13 aa, Homo sapiens
TTASTQMNVQSSR

SEQ ID NO: 3990 - protein, 7 aa, Homo sapiens
VMVNQDR

SEQ ID NO: 3991 - protein, 13 aa, Homo sapiens
VISDKDLELLLDR

SEQ ID NO: 3992 - protein, 10 aa, Homo sapiens
EVVVYAPLSK

SEQ ID NO: 3993 - protein, 10 aa, Homo sapiens
LDGSMSYSER

SEQ ID NO: 3994 - protein, 11 aa, Homo sapiens
LISQIQPEVDR

SEQ ID NO: 3995 - protein, 9 aa, Homo sapiens
LQNIMMLLR

SEQ ID NO: 3996 - protein, 9 aa, Homo sapiens
YLIVDEGHR

SEQ ID NO: 3997 - protein, 22 aa, Homo sapiens
NGDVVDKFVGIKDEDQLEAFLK

SEQ ID NO: 3998 - protein, 16 aa, Homo sapiens
FVGIKDEDQLEAFLKK

SEQ ID NO: 3999 - protein, 21 aa, Homo sapiens
VVNSETPVVVDFHAQWCGPCK

SEQ ID NO: 4000 - protein, 15 aa, Homo sapiens
FVGIKDEDQLEAFLK

SEQ ID NO: 4001 - protein, 17 aa, Homo sapiens
ISLTTFNIQDGPDFQDR

SEQ ID NO: 4002 - protein, 11 aa, Homo sapiens
ESEDSTDFNDK

SEQ ID NO: 4003 - protein, 8 aa, Homo sapiens
HSDFFNVK

SEQ ID NO: 4004 - protein, 9 aa, Homo sapiens
DCGEYAHTR

SEQ ID NO: 4005 - protein, 19 aa, Homo sapiens
EPGDQGPAHPPGADMSHSL

SEQ ID NO: 4006 - protein, 10 aa, Homo sapiens
FMEPYIFGSR

SEQ ID NO: 4007 - protein, 8 aa, Homo sapiens
LFQTAITR

SEQ ID NO: 4008 - protein, 11 aa, Homo sapiens
QFSYLIENMAR

SEQ ID NO: 4009 - protein, 8 aa, Homo sapiens
QQVEALYR

SEQ ID NO: 4010 - protein, 9 aa, Homo sapiens
RQQVEALYR

SEQ ID NO: 4011 - protein, 9 aa, Homo sapiens
VPLDPLIGK

SEQ ID NO: 4012 - protein, 20 aa, Homo sapiens
LCASGAGATPDTAIEEIKEK

SEQ ID NO: 4013 - protein, 17 aa, Homo sapiens
LPIIGVVENMSGFICPK

SEQ ID NO: 4014 - protein, 27 aa, Homo sapiens
DVDWGEVDYLIVDTPPGTSDEHLSVVR

SEQ ID NO: 4015 - protein, 18 aa, Homo sapiens
GQSFFIDAPDSPATLAYR

SEQ ID NO: 4016 - protein, 18 aa, Homo sapiens
MEEVPHDCPGADSAQAGR

SEQ ID NO: 4017 - protein, 9 aa, Homo sapiens
TPLDLAAFK

SEQ ID NO: 4018 - protein, 19 aa, Homo sapiens
GAVTGHEECVDALLQHGAK

SEQ ID NO: 4019 - protein, 16 aa, Homo sapiens
LLSSGFDIDTPDDFGR

SEQ ID NO: 4020 - protein, 19 aa, Homo sapiens
NLINATNAALQTPLHVAAR

SEQ ID NO: 4021 - protein, 12 aa, Homo sapiens
NGNQAFNEDNLK

SEQ ID NO: 4022 - protein, 9 aa, Homo sapiens
ETVGFGMLK

SEQ ID NO: 4023 - protein, 11 aa, Homo sapiens
VANLLLCMYAK

SEQ ID NO: 4024 - protein, 10 aa, Homo sapiens
FILMDCMEGR

SEQ ID NO: 4025 - protein, 15 aa, Homo sapiens
VTAAIASNIWAAYDR

SEQ ID NO: 4026 - protein, 9 aa, Homo sapiens
AALKADAQD

SEQ ID NO: 4027 - protein, 13 aa, Homo sapiens
KFVFFNIPQIQYK

SEQ ID NO: 4028 - protein, 10 aa, Homo sapiens
SNKEIMEHIR

SEQ ID NO: 4029 - protein, 10 aa, Homo sapiens
NPWVQIMMFK

SEQ ID NO: 4030 - protein, 20 aa, Homo sapiens
ECICEVEGQVPCPSLVPLPK

SEQ ID NO: 4031 - protein, 12 aa, Homo sapiens
FVFFNIPQIQYK

SEQ ID NO: 4032 - protein, 13 aa, Homo sapiens
NEETLREEEEEKK

SEQ ID NO: 4033 - protein, 12 aa, Homo sapiens
NEETLREEEEEK

SEQ ID NO: 4034 - protein, 7 aa, Homo sapiens
EIMEHIR

SEQ ID NO: 4035 - protein, 9 aa, Homo sapiens
NMTPSPFLR

SEQ ID NO: 4036 - protein, 11 aa, Homo sapiens
QLSHPANFGPR

SEQ ID NO: 4037 - protein, 17 aa, Homo sapiens
VMTVNYNTHGELGEGAR

SEQ ID NO: 4038 - protein, 17 aa, Homo sapiens
LQQALAEQQQQNNTSGK

SEQ ID NO: 4039 - protein, 14 aa, Homo sapiens
AAAVAMETDDAGNR

SEQ ID NO: 4040 - protein, 18 aa, Homo sapiens
CPIQLNEGVSFQDLDTAK

SEQ ID NO: 4041 - protein, 14 aa, Homo sapiens
ELISFLSEPEILVK

SEQ ID NO: 4042 - protein, 9 aa, Homo sapiens
AAAVSSVVR

SEQ ID NO: 4043 - protein, 12 aa, Homo sapiens
QDKIEEQSQSEK

SEQ ID NO: 4044 - protein, 15 aa, Homo sapiens
DKVVEDDEDDFPTTR

SEQ ID NO: 4045 - protein, 19 aa, Homo sapiens
ITYVANVNPGGWAPASVLR

SEQ ID NO: 4046 - protein, 9 aa, Homo sapiens
VGGLLAFAK

SEQ ID NO: 4047 - protein, 10 aa, Homo sapiens
VYFPYLLISK

SEQ ID NO: 4048 - protein, 13 aa, Homo sapiens
QAMHEGLLMPVVK

SEQ ID NO: 4049 - protein, 10 aa, Homo sapiens
VPYVIISAAK

SEQ ID NO: 4050 - protein, 15 aa, Homo sapiens
LALTLRPCAPILGAK

SEQ ID NO: 4051 - protein, 10 aa, Homo sapiens
IDISQLVITK

SEQ ID NO: 4052 - protein, 16 aa, Homo sapiens
VSANSVYGFTGAQVGK

SEQ ID NO: 4053 - protein, 17 aa, Homo sapiens
SEGGEDYTGATVIEPLK

SEQ ID NO: 4054 - protein, 26 aa, Homo sapiens
SEDPLFVLEHSLPIDTQYYLEQQLAK

SEQ ID NO: 4055 - protein, 7 aa, Homo sapiens
AEAVLLR

SEQ ID NO: 4056 - protein, 26 aa, Homo sapiens
ATQCQLEADVLWSDVVSHPPEGPWQR

SEQ ID NO: 4057 - protein, 10 aa, Homo sapiens
DLEDQEQLLR

SEQ ID NO: 4058 - protein, 15 aa, Homo sapiens
DNCPLVANLVTASLR

SEQ ID NO: 4059 - protein, 11 aa, Homo sapiens
EVSHLNALEER

SEQ ID NO: 4060 - protein, 14 aa, Homo sapiens
FGVSSVAEAMALGR

SEQ ID NO: 4061 - protein, 30 aa, Homo sapiens
GGLWDDDDAPRPSQFEEDLALMEEMEAEHR

SEQ ID NO: 4062 - protein, 10 aa, Homo sapiens
IFEPILGEGR

SEQ ID NO: 4063 - protein, 16 aa, Homo sapiens
TVLSHQGAVCEFCQPR

SEQ ID NO: 4064 - protein, 9 aa, Homo sapiens
VAGLCSNIR

SEQ ID NO: 4065 - protein, 11 aa, Homo sapiens
VQMDMLQVLLR

SEQ ID NO: 4066 - protein, 19 aa, Homo sapiens
VQSYEKEEDLLQAWSTFIR

SEQ ID NO: 4067 - protein, 9 aa, Homo sapiens
VQTFPFLGR

SEQ ID NO: 4068 - protein, 12 aa, Homo sapiens
VTGVPLSYLLSR

SEQ ID NO: 4069 - protein, 12 aa, Homo sapiens
VVYGDTDSVMCR

SEQ ID NO: 4070 - protein, 9 aa, Homo sapiens
WGEPEPFLR

SEQ ID NO: 4071 - protein, 15 aa, Homo sapiens
YAGLLFSSRPDAHDR

SEQ ID NO: 4072 - protein, 11 aa, Homo sapiens
DMATFLAEDPK

SEQ ID NO: 4073 - protein, 13 aa, Homo sapiens
IMNYDEFQHCWSK

SEQ ID NO: 4074 - protein, 10 aa, Homo sapiens
NTVWLCYEVK

SEQ ID NO: 4075 - protein, 11 aa, Homo sapiens
ELFEPWNNLPK

SEQ ID NO: 4076 - protein, 10 aa, Homo sapiens
DTFSYNFYNR

SEQ ID NO: 4077 - protein, 15 aa, Homo sapiens
DTFSYNFYNRPILSR

SEQ ID NO: 4078 - protein, 13 aa, Homo sapiens
GRHETYLCYEVER

SEQ ID NO: 4079 - protein, 14 aa, Homo sapiens
HAELCFLDVIPFWK

SEQ ID NO: 4080 - protein, 7 aa, Homo sapiens
HGFLEGR

SEQ ID NO: 4081 - protein, 19 aa, Homo sapiens
HSMDPPTFTFNFNNEPWVR

SEQ ID NO: 4082 - protein, 10 aa, Homo sapiens
HVSLCIFTAR

SEQ ID NO: 4083 - protein, 10 aa, Homo sapiens
ISIMTYSEFK

SEQ ID NO: 4084 - protein, 8 aa, Homo sapiens
LDLDQDYR

SEQ ID NO: 4085 - protein, 12 aa, Homo sapiens
MHNDTWVLLNQR

SEQ ID NO: 4086 - protein, 12 aa, Homo sapiens
IYTPVEESSIGK

SEQ ID NO: 4087 - protein, 12 aa, Homo sapiens
VGNNFHNLQEIR

SEQ ID NO: 4088 - protein, 20 aa, Homo sapiens
MISDLIAGGIQPLQNLSVLK

SEQ ID NO: 4089 - protein, 13 aa, Homo sapiens
GIDYETVPINLIK

SEQ ID NO: 4090 - protein, 13 aa, Homo sapiens
MQAGKPILYSYFR

SEQ ID NO: 4091 - protein, 9 aa, Homo sapiens
HPFFWSLEK

SEQ ID NO: 4092 - protein, 31 aa, Homo sapiens
EDPVLQVPTHVEEPAFLPDPNDGSLYTLGSK

SEQ ID NO: 4093 - protein, 14 aa, Homo sapiens
DVLGHGAEGTIVYR

SEQ ID NO: 4094 - protein, 17 aa, Homo sapiens
ETLGSLPDDFVCYFTSR

SEQ ID NO: 4095 - protein, 23 aa, Homo sapiens
QQTLSSAFADSLCPSTSLLYLGR

SEQ ID NO: 4096 - protein, 22 aa, Homo sapiens
SFEEVINLVDQTSENAPTTVSR

SEQ ID NO: 4097 - protein, 21 aa, Homo sapiens
YSTSLYASPSMVHEGVAVVPR

SEQ ID NO: 4098 - protein, 9 aa, Homo sapiens
EFLFSLPDK

SEQ ID NO: 4099 - protein, 15 aa, Homo sapiens
FDSVGGLSNHIAALK

SEQ ID NO: 4100 - protein, 12 aa, Homo sapiens
ALANECSQGDKR

SEQ ID NO: 4101 - protein, 19 aa, Homo sapiens
VFTKPVDPDEVPDYVTVIK

SEQ ID NO: 4102 - protein, 12 aa, Homo sapiens
LITNTAEAVLQK

SEQ ID NO: 4103 - protein, 12 aa, Homo sapiens
YSGVNQSMLFDK

SEQ ID NO: 4104 - protein, 18 aa, Homo sapiens
ALAILSQPTPSLVVDHER

SEQ ID NO: 4105 - protein, 18 aa, Homo sapiens
IGASLADVDPMQLDSSVR

SEQ ID NO: 4106 - protein, 10 aa, Homo sapiens
LLFDQAYQMR

SEQ ID NO: 4107 - protein, 11 aa, Homo sapiens
RLEEQEEDTFR

SEQ ID NO: 4108 - protein, 14 aa, Homo sapiens
GQIQVILGPMFSGK

SEQ ID NO: 4109 - protein, 18 aa, Homo sapiens
KPFGAILNLVPLAESVVK

SEQ ID NO: 4110 - protein, 12 aa, Homo sapiens
NTMEALPACLLR

SEQ ID NO: 4111 - protein, 19 aa, Homo sapiens
FTPSPVDFTITPETLQNVK

SEQ ID NO: 4112 - protein, 12 aa, Homo sapiens
GLSVPIYMVFPR

SEQ ID NO: 4113 - protein, 13 aa, Homo sapiens
VGNVGQTNYAASK

SEQ ID NO: 4114 - protein, 15 aa, Homo sapiens
LAGEGATVAACDLDR

SEQ ID NO: 4115 - protein, 16 aa, Homo sapiens
YYAVGDIDPQVIQLLK

SEQ ID NO: 4116 - protein, 14 aa, Homo sapiens
SLVDTVYALKDEVR

SEQ ID NO: 4117 - protein, 10 aa, Homo sapiens
IPIAGTVVTR

SEQ ID NO: 4118 - protein, 20 aa, Homo sapiens
IVVHCNNNQDFQEWLEQLNR

SEQ ID NO: 4119 - protein, 12 aa, Homo sapiens
QTAQGMDYLHAK

SEQ ID NO: 4120 - protein, 11 aa, Homo sapiens
IGSGSFGTVYK

SEQ ID NO: 4121 - protein, 13 aa, Homo sapiens
VVDPTPEQFQAFR

SEQ ID NO: 4122 - protein, 23 aa, Homo sapiens
WSGSQQVEQPTGSVLWMAPEVIR

SEQ ID NO: 4123 - protein, 13 aa, Homo sapiens
LVEGESDNRNQQK

SEQ ID NO: 4124 - protein, 12 aa, Homo sapiens
RPYAPINANAIK

SEQ ID NO: 4125 - protein, 7 aa, Homo sapiens
QDFLPWK

SEQ ID NO: 4126 - protein, 16 aa, Homo sapiens
EFEEESKQPGVSEQQR

SEQ ID NO: 4127 - protein, 8 aa, Homo sapiens
LPLATIVK

SEQ ID NO: 4128 - protein, 11 aa, Homo sapiens
DLVAQAPLKPK

SEQ ID NO: 4129 - protein, 31 aa, Homo sapiens
VKPTLIAVRPPVPLPAPSHPASTNEPIVLED

SEQ ID NO: 4130 - protein, 18 aa, Homo sapiens
CSVTLLNETDILSQYLEK

SEQ ID NO: 4131 - protein, 16 aa, Homo sapiens
LNPADAPNPVVFVATK

SEQ ID NO: 4132 - protein, 8 aa, Homo sapiens
ALTHLEMR

SEQ ID NO: 4133 - protein, 15 aa, Homo sapiens
DISSSLNSLADSNAR

SEQ ID NO: 4134 - protein, 13 aa, Homo sapiens
DITLFHAMDTLQR

SEQ ID NO: 4135 - protein, 20 aa, Homo sapiens
GHLSRPEAQSLSPYTTSANR

SEQ ID NO: 4136 - protein, 9 aa, Homo sapiens
LVEGESDNR

SEQ ID NO: 4137 - protein, 11 aa, Homo sapiens
QFESLPATHIR

SEQ ID NO: 4138 - protein, 9 aa, Homo sapiens
QPGVSEQQR

SEQ ID NO: 4139 - protein, 10 aa, Homo sapiens
TLLADQGEIR

SEQ ID NO: 4140 - protein, 18 aa, Homo sapiens
VGDYVYFENSSSNPYLVR

SEQ ID NO: 4141 - protein, 11 aa, Homo sapiens
VWDPDNPLTDR

SEQ ID NO: 4142 - protein, 8 aa, Homo sapiens
YQAEIPDR

SEQ ID NO: 4143 - protein, 21 aa, Homo sapiens
KLEEVVQILGDKFPCTLVAQK

SEQ ID NO: 4144 - protein, 10 aa, Homo sapiens
KIVFVTGNAK

SEQ ID NO: 4145 - protein, 16 aa, Homo sapiens
LKPEGLHQLLAGFEDK

SEQ ID NO: 4146 - protein, 9 aa, Homo sapiens
IVFVTGNAK

SEQ ID NO: 4147 - protein, 17 aa, Homo sapiens
IDLPEYQGEPDEISIQK

SEQ ID NO: 4148 - protein, 8 aa, Homo sapiens
AASLVGKK

SEQ ID NO: 4149 - protein, 14 aa, Homo sapiens
ALLELQEYFGSLAA

SEQ ID NO: 4150 - protein, 20 aa, Homo sapiens
SAYALCTFALSTGDPSQPVR

SEQ ID NO: 4151 - protein, 9 aa, Homo sapiens
AAVVENVVK

SEQ ID NO: 4152 - protein, 12 aa, Homo sapiens
DAMEQCHNYNAR

SEQ ID NO: 4153 - protein, 16 aa, Homo sapiens
EGLISQDGSSLEALLR

SEQ ID NO: 4154 - protein, 15 aa, Homo sapiens
GPGLASGQLYSYPAR

SEQ ID NO: 4155 - protein, 18 aa, Homo sapiens
DHASIQMNVAEVDKVTGR

SEQ ID NO: 4156 - protein, 14 aa, Homo sapiens
DHASIQMNVAEVDK

SEQ ID NO: 4157 - protein, 16 aa, Homo sapiens
MQNDAGEFVDLYVPRK

SEQ ID NO: 4158 - protein, 10 aa, Homo sapiens
MGESDDSILR

SEQ ID NO: 4159 - protein, 15 aa, Homo sapiens
MQNDAGEFVDLYVPR

SEQ ID NO: 4160 - protein, 11 aa, Homo sapiens
RMGESDDSILR

SEQ ID NO: 4161 - protein, 9 aa, Homo sapiens
TYAICGAIR

SEQ ID NO: 4162 - protein, 14 aa, Homo sapiens
ALYEQNQSDVNEAK

SEQ ID NO: 4163 - protein, 15 aa, Homo sapiens
APEGQLPAFNEDGLR

SEQ ID NO: 4164 - protein, 9 aa, Homo sapiens
CTVAYLYDR

SEQ ID NO: 4165 - protein, 10 aa, Homo sapiens
ADPSQFELLK

SEQ ID NO: 4166 - protein, 17 aa, Homo sapiens
HPWIVHWDQLPQYQLNR

SEQ ID NO: 4167 - protein, 16 aa, Homo sapiens
LGMPQFLSPEAQSLLR

SEQ ID NO: 4168 - protein, 13 aa, Homo sapiens
TVEYLHAQGVVHR

SEQ ID NO: 4169 - protein, 17 aa, Homo sapiens
IAEFFPDAVLIMLDNQK

SEQ ID NO: 4170 - protein, 10 aa, Homo sapiens
QMVGALLEDR

SEQ ID NO: 4171 - protein, 13 aa, Homo sapiens
VPPVIVLENQGLR

SEQ ID NO: 4172 - protein, 15 aa, Homo sapiens
SEWGSLLEELVAEGK

SEQ ID NO: 4173 - protein, 15 aa, Homo sapiens
VFANAPDSACVIGLK

SEQ ID NO: 4174 - protein, 12 aa, Homo sapiens
KAVAFSPVTELK

SEQ ID NO: 4175 - protein, 21 aa, Homo sapiens
TGISHGHTVYVVHDGFEGLAK

SEQ ID NO: 4176 - protein, 9 aa, Homo sapiens
VNVEHMTEK

SEQ ID NO: 4177 - protein, 9 aa, Homo sapiens
LLAHQKPPK

SEQ ID NO: 4178 - protein, 8 aa, Homo sapiens
MGIYVGAK

SEQ ID NO: 4179 - protein, 11 aa, Homo sapiens
LPLMECVQMTK

SEQ ID NO: 4180 - protein, 12 aa, Homo sapiens
AVAFSPVTELKK

SEQ ID NO: 4181 - protein, 8 aa, Homo sapiens
AMLWLSEK

SEQ ID NO: 4182 - protein, 19 aa, Homo sapiens
CHDYYTTEFLYNLYSSEGK

SEQ ID NO: 4183 - protein, 11 aa, Homo sapiens
AVAFSPVTELK

SEQ ID NO: 4184 - protein, 12 aa, Homo sapiens
GGSFENNWNIYK

SEQ ID NO: 4185 - protein, 19 aa, Homo sapiens
AIGVLTSGGDAQGMNAAVR

SEQ ID NO: 4186 - protein, 8 aa, Homo sapiens
EQWWLSLR

SEQ ID NO: 4187 - protein, 17 aa, Homo sapiens
GQVQEVGWHDVAGWLGR

SEQ ID NO: 4188 - protein, 17 aa, Homo sapiens
IMEVIDAITTTAQSHQR

SEQ ID NO: 4189 - protein, 16 aa, Homo sapiens
ISMAAYVSGELEHVTR

SEQ ID NO: 4190 - protein, 30 aa, Homo sapiens
MGMEAVMALLEATPDTPACVVTLSGNQSVR

SEQ ID NO: 4191 - protein, 9 aa, Homo sapiens
RFDEATQLR

SEQ ID NO: 4192 - protein, 22 aa, Homo sapiens
SNFSLAILNVGAPAAGMNAAVR

SEQ ID NO: 4193 - protein, 9 aa, Homo sapiens
TFVLEVMGR

SEQ ID NO: 4194 - protein, 18 aa, Homo sapiens
TNVLGHLQQGGAPTPFDR

SEQ ID NO: 4195 - protein, 33 aa, Homo sapiens
TYSHLNIAGLVGSIDNDFCGTDMTIGTDSALHR

SEQ ID NO: 4196 - protein, 9 aa, Homo sapiens
VTVLGHVQR

SEQ ID NO: 4197 - protein, 13 aa, Homo sapiens
VPETVSAATQTIK

SEQ ID NO: 4198 - protein, 14 aa, Homo sapiens
NYLLPAGYSLEEQR

SEQ ID NO: 4199 - protein, 20 aa, Homo sapiens
LFHPEELKDVIVGNTDYDWK

SEQ ID NO: 4200 - protein, 18 aa, Homo sapiens
GGAGVQVHQLLAGSGGAR

SEQ ID NO: 4201 - protein, 17 aa, Homo sapiens
SPGAQLWLFPSAAGLHR

SEQ ID NO: 4202 - protein, 19 aa, Homo sapiens
YSTMETVEEALQEAINNNR

SEQ ID NO: 4203 - protein, 14 aa, Homo sapiens
VWNVDNFTPIGEIK

SEQ ID NO: 4204 - protein, 17 aa, Homo sapiens
AGDGNEAIGALIQNYIR

SEQ ID NO: 4205 - protein, 12 aa, Homo sapiens
AMQEAIDAINNR

SEQ ID NO: 4206 - protein, 12 aa, Homo sapiens
MTIVNLEADMER

SEQ ID NO: 4207 - protein, 15 aa, Homo sapiens
VIGEDGAEGYSDLFR

SEQ ID NO: 4208 - protein, 19 aa, Homo sapiens
GKEENISCDNLVLEINSLK

SEQ ID NO: 4209 - protein, 10 aa, Homo sapiens
YCALLLPLLK

SEQ ID NO: 4210 - protein, 20 aa, Homo sapiens
AAGMNMEEEEELQQNLWGLK

SEQ ID NO: 4211 - protein, 10 aa, Homo sapiens
NVSVMTMIFK

SEQ ID NO: 4212 - protein, 7 aa, Homo sapiens
AWSPVFR

SEQ ID NO: 4213 - protein, 18 aa, Homo sapiens
FAFPLSLFQGSSDGVEVR

SEQ ID NO: 4214 - protein, 8 aa, Homo sapiens
IITSELYR

SEQ ID NO: 4215 - protein, 12 aa, Homo sapiens
VFQNEVLGTLQR

SEQ ID NO: 4216 - protein, 23 aa, Homo sapiens
WVYPLTPEANFTDSTTQSCTHSR

SEQ ID NO: 4217 - protein, 21 aa, Homo sapiens
EGNYAIVANVESMDYDPLVVK

SEQ ID NO: 4218 - protein, 19 aa, Homo sapiens
SGELQGGPDDNLIEGGGTK

SEQ ID NO: 4219 - protein, 13 aa, Homo sapiens
SKDPSGLLISVIR

SEQ ID NO: 4220 - protein, 15 aa, Homo sapiens
TLSTSDDVEDRENEK

SEQ ID NO: 4221 - protein, 13 aa, Homo sapiens
HVLNLLDEIENIK

SEQ ID NO: 4222 - protein, 15 aa, Homo sapiens
ALANMHESLEWLASR

SEQ ID NO: 4223 - protein, 16 aa, Homo sapiens
DASVPLIDVTNLPTPR

SEQ ID NO: 4224 - protein, 16 aa, Homo sapiens
FLDTSHYSTAGSSSVR

SEQ ID NO: 4225 - protein, 16 aa, Homo sapiens
IQDVLQMLLTEYLDMK

SEQ ID NO: 4226 - protein, 9 aa, Homo sapiens
LIPPQDILR

SEQ ID NO: 4227 - protein, 9 aa, Homo sapiens
REEEEDFIR

SEQ ID NO: 4228 - protein, 16 aa, Homo sapiens
TASEPSAQLSYASTGR

SEQ ID NO: 4229 - protein, 15 aa, Homo sapiens
YTELEYIHALTLLHR

SEQ ID NO: 4230 - protein, 21 aa, Homo sapiens
MSLQTDEDEHSIEMHLPYTAK

SEQ ID NO: 4231 - protein, 7 aa, Homo sapiens
IYGELWK

SEQ ID NO: 4232 - protein, 15 aa, Homo sapiens
HPIGVLLNAITELQK

SEQ ID NO: 4233 - protein, 31 aa, Homo sapiens
EASHAGSWYTASGPQLNAQLEGWLSQVQSTK

SEQ ID NO: 4234 - protein, 19 aa, Homo sapiens
MGMSIIEQLDPVSFSNYLK

SEQ ID NO: 4235 - protein, 14 aa, Homo sapiens
IFILGPSHHVPLSR

SEQ ID NO: 4236 - protein, 7 aa, Homo sapiens
TPLYDLR

SEQ ID NO: 4237 - protein, 13 aa, Homo sapiens
YSYYDESQGEIYR

SEQ ID NO: 4238 - protein, 11 aa, Homo sapiens
SANNSPPSAQK

SEQ ID NO: 4239 - protein, 21 aa, Homo sapiens
SVLPTAIPAVLPAASPCSSPK

SEQ ID NO: 4240 - protein, 19 aa, Homo sapiens
MFFLDPSDLDVERDEEAVK

SEQ ID NO: 4241 - protein, 12 aa, Homo sapiens
FPECGFFGMYDK

SEQ ID NO: 4242 - protein, 14 aa, Homo sapiens
GLDDTEEPSPPEDK

SEQ ID NO: 4243 - protein, 22 aa, Homo sapiens
PLQPEYVALPSEESHVHQEPSK

SEQ ID NO: 4244 - protein, 17 aa, Homo sapiens
APTFCDYCGEMLWGLVR

SEQ ID NO: 4245 - protein, 10 aa, Homo sapiens
DLVCSIVYQK

SEQ ID NO: 4246 - protein, 10 aa, Homo sapiens
EGWMVHYTSR

SEQ ID NO: 4247 - protein, 15 aa, Homo sapiens
HFIMAPNPDDMEEDP

SEQ ID NO: 4248 - protein, 26 aa, Homo sapiens
NEVAILQNLHHPGIVNLECMFETPER

SEQ ID NO: 4249 - protein, 15 aa, Homo sapiens
SVVGTPAYLAPEVLR

SEQ ID NO: 4250 - protein, 14 aa, Homo sapiens
TISPSTSNNIPLMR

SEQ ID NO: 4251 - protein, 9 aa, Homo sapiens
NYNKPWEPK

SEQ ID NO: 4252 - protein, 13 aa, Homo sapiens
MLNTNYHLPPSPK

SEQ ID NO: 4253 - protein, 9 aa, Homo sapiens
VVLLTEVDK

SEQ ID NO: 4254 - protein, 12 aa, Homo sapiens
VVLLTEVDKLTK

SEQ ID NO: 4255 - protein, 18 aa, Homo sapiens
VPAPSIEDICHVLSTVCK

SEQ ID NO: 4256 - protein, 8 aa, Homo sapiens
VVIQEMLK

SEQ ID NO: 4257 - protein, 21 aa, Homo sapiens
NLVQCGDFPHLLVYGPSGAGK

SEQ ID NO: 4258 - protein, 14 aa, Homo sapiens
ETANAIVSQQTPQR

SEQ ID NO: 4259 - protein, 13 aa, Homo sapiens
GEVAQMAAYYEHR

SEQ ID NO: 4260 - protein, 14 aa, Homo sapiens
TVAQSQQLETNSQR

SEQ ID NO: 4261 - protein, 18 aa, Homo sapiens
SSAPTTPPSVDKVDGFSR

SEQ ID NO: 4262 - protein, 14 aa, Homo sapiens
STLNELVDYITISR

SEQ ID NO: 4263 - protein, 18 aa, Homo sapiens
LECPDPSILAHYMRRFAK

SEQ ID NO: 4264 - protein, 13 aa, Homo sapiens
FELPFDIPEEEAR

SEQ ID NO: 4265 - protein, 10 aa, Homo sapiens
VVNLGVLAQK

SEQ ID NO: 4266 - protein, 9 aa, Homo sapiens
LLYTFPGWK

SEQ ID NO: 4267 - protein, 9 aa, Homo sapiens
NLLNLDVIK

SEQ ID NO: 4268 - protein, 18 aa, Homo sapiens
SLSPDCGGSIEVMQSFLK

SEQ ID NO: 4269 - protein, 9 aa, Homo sapiens
SFHTYDVQK

SEQ ID NO: 4270 - protein, 9 aa, Homo sapiens
GLQNTMSVR

SEQ ID NO: 4271 - protein, 12 aa, Homo sapiens
IWIFDGPTGEGR

SEQ ID NO: 4272 - protein, 12 aa, Homo sapiens
QDWGPITSISFR

SEQ ID NO: 4273 - protein, 15 aa, Homo sapiens
SAPFFIPTIPGLVPR

SEQ ID NO: 4274 - protein, 10 aa, Homo sapiens
TASALFAGFR

SEQ ID NO: 4275 - protein, 14 aa, Homo sapiens
YAAPEQNNDPQQSK

SEQ ID NO: 4276 - protein, 27 aa, Homo sapiens
YYGQNGQQILSASQDGTLQSFSTVHEK

SEQ ID NO: 4277 - protein, 14 aa, Homo sapiens
YNPGSESECIGHFK

SEQ ID NO: 4278 - protein, 8 aa, Homo sapiens
FLENLLEK

SEQ ID NO: 4279 - protein, 11 aa, Homo sapiens
NQQDNPEANWK

SEQ ID NO: 4280 - protein, 12 aa, Homo sapiens
KLAVASVTEILK

SEQ ID NO: 4281 - protein, 9 aa, Homo sapiens
EFLIALLEK

SEQ ID NO: 4282 - protein, 18 aa, Homo sapiens
ELGSANVISWNHHEFEVK

SEQ ID NO: 4283 - protein, 17 aa, Homo sapiens
YSTDESITSLAEFVVQK

SEQ ID NO: 4284 - protein, 8 aa, Homo sapiens
SNLIWNFK

SEQ ID NO: 4285 - protein, 9 aa, Homo sapiens
DLACFYTTK

SEQ ID NO: 4286 - protein, 13 aa, Homo sapiens
AIIEEGDKEIATK

SEQ ID NO: 4287 - protein, 15 aa, Homo sapiens
QLVLETLYALTSSTK

SEQ ID NO: 4288 - protein, 18 aa, Homo sapiens
HLVGLWTADNATATNLLK

SEQ ID NO: 4289 - protein, 15 aa, Homo sapiens
SGPYGFHEMQELWTK

SEQ ID NO: 4290 - protein, 17 aa, Homo sapiens
LLEGIGLENLDSPAATK

SEQ ID NO: 4291 - protein, 11 aa, Homo sapiens
ENINQKPVVLR

SEQ ID NO: 4292 - protein, 15 aa, Homo sapiens
SEETNQQEVANSLAK

SEQ ID NO: 4293 - protein, 21 aa, Homo sapiens
KPVILEVTPGGFDQINPATNR

SEQ ID NO: 4294 - protein, 17 aa, Homo sapiens
ATVPLQSNVIEAAPDMK

SEQ ID NO: 4295 - protein, 14 aa, Homo sapiens
VYNEVPTFQLEVPK

SEQ ID NO: 4296 - protein, 15 aa, Homo sapiens
IVDGPDPENIILILK

SEQ ID NO: 4297 - protein, 11 aa, Homo sapiens
AGFLAFTQLPK

SEQ ID NO: 4298 - protein, 13 aa, Homo sapiens
TYGSEFVYSDHAK

SEQ ID NO: 4299 - protein, 14 aa, Homo sapiens
TITMETSDDLLFSK

SEQ ID NO: 4300 - protein, 13 aa, Homo sapiens
ADTVGLACEAINR

SEQ ID NO: 4301 - protein, 26 aa, Homo sapiens
DNPEAAVHIFEGTHENPELIWNDNSR

SEQ ID NO: 4302 - protein, 12 aa, Homo sapiens
DSLLASLLDGVR

SEQ ID NO: 4303 - protein, 13 aa, Homo sapiens
ENGLEVLQEAFSR

SEQ ID NO: 4304 - protein, 12 aa, Homo sapiens
EPLEFEQYLNLR

SEQ ID NO: 4305 - protein, 27 aa, Homo sapiens
ESPLLPAATELAFHTVNCSALNAEELR

SEQ ID NO: 4306 - protein, 16 aa, Homo sapiens
FLATPPNGNFADAVFR

SEQ ID NO: 4307 - protein, 11 aa, Homo sapiens
FLPSVFMDAMR

SEQ ID NO: 4308 - protein, 7 aa, Homo sapiens
GQDIFQR

SEQ ID NO: 4309 - protein, 11 aa, Homo sapiens
IAAHLADFTPR

SEQ ID NO: 4310 - protein, 11 aa, Homo sapiens
IEANWDLFYYR

SEQ ID NO: 4311 - protein, 11 aa, Homo sapiens
IFIAQPAWVLR

SEQ ID NO: 4312 - protein, 7 aa, Homo sapiens
IGDYYLR

SEQ ID NO: 4313 - protein, 18 aa, Homo sapiens
LGGYLAEEQATPENPTIR

SEQ ID NO: 4314 - protein, 8 aa, Homo sapiens
LSVHALSR

SEQ ID NO: 4315 - protein, 18 aa, Homo sapiens
MLNSNTESPYLIWNNSTR

SEQ ID NO: 4316 - protein, 15 aa, Homo sapiens
SAIDHAGNYIGISLR

SEQ ID NO: 4317 - protein, 12 aa, Homo sapiens
SLAGMLTPYVAR

SEQ ID NO: 4318 - protein, 14 aa, Homo sapiens
SLQYGEQVNEILCR

SEQ ID NO: 4319 - protein, 9 aa, Homo sapiens
TELLTEALR

SEQ ID NO: 4320 - protein, 9 aa, Homo sapiens
VEMALEALR

SEQ ID NO: 4321 - protein, 12 aa, Homo sapiens
VLALTETCLVER

SEQ ID NO: 4322 - protein, 18 aa, Homo sapiens
WGLLSMPVDEEVESLHLR

SEQ ID NO: 4323 - protein, 9 aa, Homo sapiens
YAGYPMLIR

SEQ ID NO: 4324 - protein, 8 aa, Homo sapiens
YIIGMLER

SEQ ID NO: 4325 - protein, 16 aa, Homo sapiens
GYSAYDFSDQEDEMAK

SEQ ID NO: 4326 - protein, 9 aa, Homo sapiens
DKQVVTQVR

SEQ ID NO: 4327 - protein, 7 aa, Homo sapiens
QVVTQVR

SEQ ID NO: 4328 - protein, 10 aa, Homo sapiens
TGSTPYWIVR

SEQ ID NO: 4329 - protein, 23 aa, Homo sapiens
QWLEDALRENEAGSCFIFLVGTK

SEQ ID NO: 4330 - protein, 16 aa, Homo sapiens
VAALAFEQSVLQDLER

SEQ ID NO: 4331 - protein, 11 aa, Homo sapiens
LMEIITVENPK

SEQ ID NO: 4332 - protein, 14 aa, Homo sapiens
LLITGTEQFNQKPK

SEQ ID NO: 4333 - protein, 9 aa, Homo sapiens
KGIQFLQEK

SEQ ID NO: 4334 - protein, 17 aa, Homo sapiens
SATDADVVNSGWLVVGK

SEQ ID NO: 4335 - protein, 17 aa, Homo sapiens
SGCSDLEEAVDSGADKK

SEQ ID NO: 4336 - protein, 12 aa, Homo sapiens
LDALEWESCFNK

SEQ ID NO: 4337 - protein, 21 aa, Homo sapiens
FTALSSESIENLPSVFGSNPK

SEQ ID NO: 4338 - protein, 14 aa, Homo sapiens
VSHQVAYGLHELLK

SEQ ID NO: 4339 - protein, 15 aa, Homo sapiens
DAAHITPDNFELCVK

SEQ ID NO: 4340 - protein, 15 aa, Homo sapiens
FVGTDPASDEVVLMK

SEQ ID NO: 4341 - protein, 26 aa, Homo sapiens
TPGHPPPPEIPSELGACDFEKPESPR

SEQ ID NO: 4342 - protein, 12 aa, Homo sapiens
DDVDNSKPGPSR

SEQ ID NO: 4343 - protein, 9 aa, Homo sapiens
SLEETIIQK

SEQ ID NO: 4344 - protein, 10 aa, Homo sapiens
VLNSLTQQEK

SEQ ID NO: 4345 - protein, 13 aa, Homo sapiens
AASIYSSWAEEQR

SEQ ID NO: 4346 - protein, 18 aa, Homo sapiens
AVGMASDIPGLHLPGGGR

SEQ ID NO: 4347 - protein, 14 aa, Homo sapiens
EGTALVPYGLPCIR

SEQ ID NO: 4348 - protein, 11 aa, Homo sapiens
ENYVWNVLLHR

SEQ ID NO: 4349 - protein, 11 aa, Homo sapiens
FLISLTNPHDR

SEQ ID NO: 4350 - protein, 29 aa, Homo sapiens
FLSYALIDPTHEGTAEGMENMADAVTHAR

SEQ ID NO: 4351 - protein, 9 aa, Homo sapiens
FSCLLPDPR

SEQ ID NO: 4352 - protein, 14 aa, Homo sapiens
GGGPSALWEITWER

SEQ ID NO: 4353 - protein, 8 aa, Homo sapiens
LLEAFTER

SEQ ID NO: 4354 - protein, 17 aa, Homo sapiens
LLENISPADVGGMEETR

SEQ ID NO: 4355 - protein, 10 aa, Homo sapiens
LPGEAPVIQR

SEQ ID NO: 4356 - protein, 7 aa, Homo sapiens
LYLEAFR

SEQ ID NO: 4357 - protein, 9 aa, Homo sapiens
MIGEFVSDR

SEQ ID NO: 4358 - protein, 15 aa, Homo sapiens
NEEIVMPEEQTGLVR

SEQ ID NO: 4359 - protein, 25 aa, Homo sapiens
TLLLTPVGAHLTNESVCEIMQSCFR

SEQ ID NO: 4360 - protein, 8 aa, Homo sapiens
TVFHLAHR

SEQ ID NO: 4361 - protein, 12 aa, Homo sapiens
FVIEENLHCIIK

SEQ ID NO: 4362 - protein, 12 aa, Homo sapiens
TCAAQLVSYPGK

SEQ ID NO: 4363 - protein, 20 aa, Homo sapiens
WSWEDWSDCLSQDPESPKPK

SEQ ID NO: 4364 - protein, 11 aa, Homo sapiens
SFSHSFSALAK

SEQ ID NO: 4365 - protein, 10 aa, Homo sapiens
IFANTESYLK

SEQ ID NO: 4366 - protein, 12 aa, Homo sapiens
NHPQMIAVLVDK

SEQ ID NO: 4367 - protein, 11 aa, Homo sapiens
ATNDEIFSILK

SEQ ID NO: 4368 - protein, 21 aa, Homo sapiens
DVPNPNQDDDDDEGFSFNPLK

SEQ ID NO: 4369 - protein, 22 aa, Homo sapiens
ILDIVPPTFSALCPANPTCIYK

SEQ ID NO: 4370 - protein, 12 aa, Homo sapiens
ANNYNEAVYLVR

SEQ ID NO: 4371 - protein, 11 aa, Homo sapiens
LDTMNTTCVDR

SEQ ID NO: 4372 - protein, 7 aa, Homo sapiens
LLCTVAR

SEQ ID NO: 4373 - protein, 20 aa, Homo sapiens
LQPGSLPQVLAQATEMLYMR

SEQ ID NO: 4374 - protein, 21 aa, Homo sapiens
MFDYTDDPEGPVMPGSHSVER

SEQ ID NO: 4375 - protein, 7 aa, Homo sapiens
VMFEVWR

SEQ ID NO: 4376 - protein, 12 aa, Homo sapiens
TPEAPAHSEKPR

SEQ ID NO: 4377 - protein, 12 aa, Homo sapiens
KGLEPSQSTAAK

SEQ ID NO: 4378 - protein, 19 aa, Homo sapiens
TKYPTQSGKPPLLVSAPSK

SEQ ID NO: 4379 - protein, 11 aa, Homo sapiens
NVATEGTSTQK

SEQ ID NO: 4380 - protein, 12 aa, Homo sapiens
DEDIPLFPVQTK

SEQ ID NO: 4381 - protein, 13 aa, Homo sapiens
HLLSQPLFTESQK

SEQ ID NO: 4382 - protein, 10 aa, Homo sapiens
TWIPEVHDQK

SEQ ID NO: 4383 - protein, 10 aa, Homo sapiens
SESALSCLSK

SEQ ID NO: 4384 - protein, 13 aa, Homo sapiens
KDEDIPLFPVQTK

SEQ ID NO: 4385 - protein, 12 aa, Homo sapiens
NEATVETLTETK

SEQ ID NO: 4386 - protein, 7 aa, Homo sapiens
LDLLMQK

SEQ ID NO: 4387 - protein, 15 aa, Homo sapiens
DKLDILGAAETGSGK

SEQ ID NO: 4388 - protein, 20 aa, Homo sapiens
ATNEGLSLMLIGPEDVINFK

SEQ ID NO: 4389 - protein, 14 aa, Homo sapiens
LEDCVLLATDVAAR

SEQ ID NO: 4390 - protein, 11 aa, Homo sapiens
RPEIVVATPGR

SEQ ID NO: 4391 - protein, 12 aa, Homo sapiens
RPLLGLVLTPTR

SEQ ID NO: 4392 - protein, 8 aa, Homo sapiens
TSEIYVHR

SEQ ID NO: 4393 - protein, 11 aa, Homo sapiens
VQHVIHYQVPR

SEQ ID NO: 4394 - protein, 13 aa, Homo sapiens
ELDQWVEQLNECK

SEQ ID NO: 4395 - protein, 16 aa, Homo sapiens
IITLEEGDIILTGTPK

SEQ ID NO: 4396 - protein, 14 aa, Homo sapiens
SFTASCPVSAFVPK

SEQ ID NO: 4397 - protein, 31 aa, Homo sapiens
SAVLSEPVLFLKPSTAYAPEGSPILMPAYTR

SEQ ID NO: 4398 - protein, 14 aa, Homo sapiens
YDYVFPENGLVAYK

SEQ ID NO: 4399 - protein, 8 aa, Homo sapiens
TIYFFGDK

SEQ ID NO: 4400 - protein, 11 aa, Homo sapiens
IGVVGGSDFEK

SEQ ID NO: 4401 - protein, 12 aa, Homo sapiens
VQEQLGNDVVEK

SEQ ID NO: 4402 - protein, 7 aa, Homo sapiens
GTFIEFR

SEQ ID NO: 4403 - protein, 13 aa, Homo sapiens
TMGYSVTAPEDTR

SEQ ID NO: 4404 - protein, 14 aa, Homo sapiens
TMGYSVTAPEDTRR

SEQ ID NO: 4405 - protein, 15 aa, Homo sapiens
TMPGGNDHEIFTDPR

SEQ ID NO: 4406 - protein, 11 aa, Homo sapiens
TSTLSVSSFFK

SEQ ID NO: 4407 - protein, 12 aa, Homo sapiens
TSGIVLSSLPYK

SEQ ID NO: 4408 - protein, 18 aa, Homo sapiens
VLQQGEIGDCAEPYTVIK

SEQ ID NO: 4409 - protein, 18 aa, Homo sapiens
FGDLDEQEFVYKEPAITK

SEQ ID NO: 4410 - protein, 19 aa, Homo sapiens
SSGPEFLQEVYTAVTYHNK

SEQ ID NO: 4411 - protein, 19 aa, Homo sapiens
IQFMCGEDASNAMPVIFGK

SEQ ID NO: 4412 - protein, 14 aa, Homo sapiens
LQTGSYCLPVALEK

SEQ ID NO: 4413 - protein, 11 aa, Homo sapiens
NQGSPEICGFK

SEQ ID NO: 4414 - protein, 15 aa, Homo sapiens
LENLLQQVSAEDFEK

SEQ ID NO: 4415 - protein, 11 aa, Homo sapiens
HLNVLCDVSGK

SEQ ID NO: 4416 - protein, 16 aa, Homo sapiens
EEFVLTPIEVAIEDMK

SEQ ID NO: 4417 - protein, 13 aa, Homo sapiens
AHTPSVAASSQAR

SEQ ID NO: 4418 - protein, 15 aa, Homo sapiens
EFQEDPEMLMDLMYR

SEQ ID NO: 4419 - protein, 11 aa, Homo sapiens
EVTDVDSVVGR

SEQ ID NO: 4420 - protein, 12 aa, Homo sapiens
FMYTTPFTLEGR

SEQ ID NO: 4421 - protein, 11 aa, Homo sapiens
FSFGATSNFAR

SEQ ID NO: 4422 - protein, 11 aa, Homo sapiens
GPVTACDFDLR

SEQ ID NO: 4423 - protein, 12 aa, Homo sapiens
IASMFDLTSEYR

SEQ ID NO: 4424 - protein, 7 aa, Homo sapiens
LEEALLR

SEQ ID NO: 4425 - protein, 10 aa, Homo sapiens
LSIICLNSSR

SEQ ID NO: 4426 - protein, 11 aa, Homo sapiens
LSNLPTLISMR

SEQ ID NO: 4427 - protein, 10 aa, Homo sapiens
LVIPILEAHR

SEQ ID NO: 4428 - protein, 19 aa, Homo sapiens
MSYYCSGSSDAPSSPAAPR

SEQ ID NO: 4429 - protein, 11 aa, Homo sapiens
SGAPTALLDPR

SEQ ID NO: 4430 - protein, 9 aa, Homo sapiens
SYQASPDLR

SEQ ID NO: 4431 - protein, 12 aa, Homo sapiens
WIADLPSTQLNR

SEQ ID NO: 4432 - protein, 9 aa, Homo sapiens
FGVLSDNFK

SEQ ID NO: 4433 - protein, 12 aa, Homo sapiens
LIPVSDINDKEK

SEQ ID NO: 4434 - protein, 16 aa, Homo sapiens
GMGLVNHVFTEDNLKK

SEQ ID NO: 4435 - protein, 11 aa, Homo sapiens
CGLPYVEVLCK

SEQ ID NO: 4436 - protein, 19 aa, Homo sapiens
GQESAGIVTSDGSSVPTFK

SEQ ID NO: 4437 - protein, 12 aa, Homo sapiens
EVLPGEIVEISR

SEQ ID NO: 4438 - protein, 11 aa, Homo sapiens
HNVQTLDIISR

SEQ ID NO: 4439 - protein, 10 aa, Homo sapiens
IVLVDDSIVR

SEQ ID NO: 4440 - protein, 12 aa, Homo sapiens
LYVSNLGIGHTR

SEQ ID NO: 4441 - protein, 11 aa, Homo sapiens
SGHCTACLTGK

SEQ ID NO: 4442 - protein, 13 aa, Homo sapiens
NCTAGAVYTYHEK

SEQ ID NO: 4443 - protein, 11 aa, Homo sapiens
EAILEYILHQK

SEQ ID NO: 4444 - protein, 26 aa, Homo sapiens
DSLSNATPCAVLRPSGAVVTLECVEK

SEQ ID NO: 4445 - protein, 15 aa, Homo sapiens
VLPSFWIPSLTPEAK

SEQ ID NO: 4446 - protein, 21 aa, Homo sapiens
ALSGTSPDDVQPGPSVGPPSK

SEQ ID NO: 4447 - protein, 11 aa, Homo sapiens
LTDRDIIVLQR

SEQ ID NO: 4448 - protein, 18 aa, Homo sapiens
MSDLTPVHFTPLDSSVDR

SEQ ID NO: 4449 - protein, 11 aa, Homo sapiens
SQWSPALTISK

SEQ ID NO: 4450 - protein, 10 aa, Homo sapiens
INKELSDLAR

SEQ ID NO: 4451 - protein, 7 aa, Homo sapiens
ALLALAK

SEQ ID NO: 4452 - protein, 10 aa, Homo sapiens
HPGLLLILGK

SEQ ID NO: 4453 - protein, 19 aa, Homo sapiens
ELATNLNVGTSSSAASSLK

SEQ ID NO: 4454 - protein, 7 aa, Homo sapiens
LILLHHK

SEQ ID NO: 4455 - protein, 7 aa, Homo sapiens
FDKLPVK

SEQ ID NO: 4456 - protein, 8 aa, Homo sapiens
LVLETLSK

SEQ ID NO: 4457 - protein, 20 aa, Homo sapiens
SNSVGIQDAFNDGSDSTFQK

SEQ ID NO: 4458 - protein, 8 aa, Homo sapiens
YLAFTEEK

SEQ ID NO: 4459 - protein, 12 aa, Homo sapiens
QYIQCLYAFECK

SEQ ID NO: 4460 - protein, 14 aa, Homo sapiens
SLSFVPGNDFEMSK

SEQ ID NO: 4461 - protein, 20 aa, Homo sapiens
AAAGQESEGPAVGPPQPLGK

SEQ ID NO: 4462 - protein, 12 aa, Homo sapiens
RPMDGTYGPPAK

SEQ ID NO: 4463 - protein, 21 aa, Homo sapiens
GYQGYPGGDYSGGPQDGGAGK

SEQ ID NO: 4464 - protein, 14 aa, Homo sapiens
AAGPGLGNVAMGPR

SEQ ID NO: 4465 - protein, 21 aa, Homo sapiens
AGPPVPASHIAPAPVQPPMIR

SEQ ID NO: 4466 - protein, 12 aa, Homo sapiens
AMGMTNLPAVGR

SEQ ID NO: 4467 - protein, 9 aa, Homo sapiens
CVCVSNTIR

SEQ ID NO: 4468 - protein, 9 aa, Homo sapiens
DIGTPEAWR

SEQ ID NO: 4469 - protein, 15 aa, Homo sapiens
EEAGGEAAAAAAAER

SEQ ID NO: 4470 - protein, 10 aa, Homo sapiens
EYEVGDPGQR

SEQ ID NO: 4471 - protein, 36 aa, Homo sapiens
FGAMGGGGPSAAGGGTPQPTATPTLNQLLTSPSSAR

SEQ ID NO: 4472 - protein, 12 aa, Homo sapiens
FPFGISPAQSHR

SEQ ID NO: 4473 - protein, 13 aa, Homo sapiens
GGQEDMNLSLQSR

SEQ ID NO: 4474 - protein, 12 aa, Homo sapiens
ITATMDDMLSTR

SEQ ID NO: 4475 - protein, 19 aa, Homo sapiens
LSIQDNNVDLILATPPFSR

SEQ ID NO: 4476 - protein, 10 aa, Homo sapiens
LYELGGEPER

SEQ ID NO: 4477 - protein, 10 aa, Homo sapiens
NDMTYNYANR

SEQ ID NO: 4478 - protein, 19 aa, Homo sapiens
NPQMPQYSSPQPGSALSPR

SEQ ID NO: 4479 - protein, 17 aa, Homo sapiens
QSTGSAPQGPAYHGVNR

SEQ ID NO: 4480 - protein, 16 aa, Homo sapiens
RPAGGPQNQFPFQFGR

SEQ ID NO: 4481 - protein, 17 aa, Homo sapiens
TELLPSRPHAPCPPAPR

SEQ ID NO: 4482 - protein, 14 aa, Homo sapiens
VDENHSEFTLYESR

SEQ ID NO: 4483 - protein, 12 aa, Homo sapiens
VQEFDSGLLHWR

SEQ ID NO: 4484 - protein, 12 aa, Homo sapiens
YPPQQQQQQQQR

SEQ ID NO: 4485 - protein, 7 aa, Homo sapiens
YPHLSPK

SEQ ID NO: 4486 - protein, 19 aa, Homo sapiens
RLFLDGDQLTLADCSLLPK

SEQ ID NO: 4487 - protein, 21 aa, Homo sapiens
KPEELKDLAPGTNPPFLVYNK

SEQ ID NO: 4488 - protein, 18 aa, Homo sapiens
SGLRPGTQVDPEIELFVK

SEQ ID NO: 4489 - protein, 16 aa, Homo sapiens
AGSDGESIGNCPFCQR

SEQ ID NO: 4490 - protein, 13 aa, Homo sapiens
DFDIPAEFSGVWR

SEQ ID NO: 4491 - protein, 10 aa, Homo sapiens
FNVTTVDMTR

SEQ ID NO: 4492 - protein, 13 aa, Homo sapiens
IEEFLEQTLAPPR

SEQ ID NO: 4493 - protein, 26 aa, Homo sapiens
RLDDYLNTPLLDEIDPDSAEEPPVSR

SEQ ID NO: 4494 - protein, 8 aa, Homo sapiens
YLHNAYAR

SEQ ID NO: 4495 - protein, 15 aa, Homo sapiens
YRDFDIPAEFSGVWR

SEQ ID NO: 4496 - protein, 12 aa, Homo sapiens
TLWIWECGITAK

SEQ ID NO: 4497 - protein, 22 aa, Homo sapiens
SNELGDVGVHCVLQGLQTPSCK

SEQ ID NO: 4498 - protein, 10 aa, Homo sapiens
DSPCQLEALK

SEQ ID NO: 4499 - protein, 14 aa, Homo sapiens
ELCQGLGQPGSVLR

SEQ ID NO: 4500 - protein, 22 aa, Homo sapiens
ELDLSNNCLGDAGILQLVESVR

SEQ ID NO: 4501 - protein, 15 aa, Homo sapiens
ELSLAGNELGDEGAR

SEQ ID NO: 4502 - protein, 15 aa, Homo sapiens
ELTVSNNDINEAGVR

SEQ ID NO: 4503 - protein, 10 aa, Homo sapiens
LDDCGLTEAR

SEQ ID NO: 4504 - protein, 7 aa, Homo sapiens
LEDAGVR

SEQ ID NO: 4505 - protein, 12 aa, Homo sapiens
LESCGVTSDNCR

SEQ ID NO: 4506 - protein, 19 aa, Homo sapiens
LGDVGMAELCPGLLHPSSR

SEQ ID NO: 4507 - protein, 19 aa, Homo sapiens
LLCETLLEPGCQLESLWVK

SEQ ID NO: 4508 - protein, 21 aa, Homo sapiens
LQLEYCSLSAASCEPLASVLR

SEQ ID NO: 4509 - protein, 21 aa, Homo sapiens
LSLQNCCLTGAGCGVLSSTLR

SEQ ID NO: 4510 - protein, 7 aa, Homo sapiens
VLCQGLK

SEQ ID NO: 4511 - protein, 11 aa, Homo sapiens
VNPALAELNLR

SEQ ID NO: 4512 - protein, 15 aa, Homo sapiens
WAELLPLLQQCQVVR

SEQ ID NO: 4513 - protein, 10 aa, Homo sapiens
RLIPDGCGVK

SEQ ID NO: 4514 - protein, 14 aa, Homo sapiens
FNADEFEDMVAEKR

SEQ ID NO: 4515 - protein, 29 aa, Homo sapiens
AKVDEFPLCGHMVSDEYEQLSSEALEAAR

SEQ ID NO: 4516 - protein, 12 aa, Homo sapiens
GAFGKPQGTVAR

SEQ ID NO: 4517 - protein, 13 aa, Homo sapiens
FNADEFEDMVAEK

SEQ ID NO: 4518 - protein, 8 aa, Homo sapiens
EHVIEALR

SEQ ID NO: 4519 - protein, 9 aa, Homo sapiens
EHVIEALRR

SEQ ID NO: 4520 - protein, 9 aa, Homo sapiens
MLSCAGADR

SEQ ID NO: 4521 - protein, 27 aa, Homo sapiens
VDEFPLCGHMVSDEYEQLSSEALEAAR

SEQ ID NO: 4522 - protein, 11 aa, Homo sapiens
VHIGQVIMSIR

SEQ ID NO: 4523 - protein, 17 aa, Homo sapiens
DIKPQNLLLDPDTAVLK

SEQ ID NO: 4524 - protein, 15 aa, Homo sapiens
GQTNNAASASASNST

SEQ ID NO: 4525 - protein, 22 aa, Homo sapiens
IQAAASTPTNATAASDANTGDR

SEQ ID NO: 4526 - protein, 9 aa, Homo sapiens
YQVEYDAYK

SEQ ID NO: 4527 - protein, 16 aa, Homo sapiens
LPLHTLTSSTPVVLVR

SEQ ID NO: 4528 - protein, 12 aa, Homo sapiens
RLGPGSSGGSAR

SEQ ID NO: 4529 - protein, 10 aa, Homo sapiens
FFEFGSLDQK

SEQ ID NO: 4530 - protein, 8 aa, Homo sapiens
VLALSQHK

SEQ ID NO: 4531 - protein, 22 aa, Homo sapiens
SESGGLGVSMVEYVLSSSPADK

SEQ ID NO: 4532 - protein, 17 aa, Homo sapiens
DLIGHIVEFSQDQHGSR

SEQ ID NO: 4533 - protein, 19 aa, Homo sapiens
ETAWGASHHSMSQPIMVQR

SEQ ID NO: 4534 - protein, 10 aa, Homo sapiens
GIFLGDDEWR

SEQ ID NO: 4535 - protein, 12 aa, Homo sapiens
ISRPHPSTAESK

SEQ ID NO: 4536 - protein, 16 aa, Homo sapiens
HNPTVTGHQEQTYLQK

SEQ ID NO: 4537 - protein, 13 aa, Homo sapiens
LTTDPDLILEVLR

SEQ ID NO: 4538 - protein, 11 aa, Homo sapiens
MLLFVEQVASK

SEQ ID NO: 4539 - protein, 12 aa, Homo sapiens
VMEVMPLMYDLK

SEQ ID NO: 4540 - protein, 18 aa, Homo sapiens
INAGLNVIGIPSEIISPK

SEQ ID NO: 4541 - protein, 13 aa, Homo sapiens
NWQGGILSGGFEK

SEQ ID NO: 4542 - protein, 12 aa, Homo sapiens
DSNLLLEDVTWK

SEQ ID NO: 4543 - protein, 13 aa, Homo sapiens
LVNCPETFTPDMR

SEQ ID NO: 4544 - protein, 10 aa, Homo sapiens
YTALNLIGPR

SEQ ID NO: 4545 - protein, 16 aa, Homo sapiens
VDDHDSEEICLDHLCK

SEQ ID NO: 4546 - protein, 18 aa, Homo sapiens
LSTPSSVTKPANSVFTTK

SEQ ID NO: 4547 - protein, 10 aa, Homo sapiens
KIENSELLDK

SEQ ID NO: 4548 - protein, 13 aa, Homo sapiens
TWTDFEHMETIEK

SEQ ID NO: 4549 - protein, 11 aa, Homo sapiens
SNPSVFVIFQK

SEQ ID NO: 4550 - protein, 19 aa, Homo sapiens
EHGLNPDVVQNIQDICNSK

SEQ ID NO: 4551 - protein, 13 aa, Homo sapiens
NESGTWIQYGEEK

SEQ ID NO: 4552 - protein, 10 aa, Homo sapiens
KFTYLGSQDR

SEQ ID NO: 4553 - protein, 14 aa, Homo sapiens
RPTFVPQWYVQQMK

SEQ ID NO: 4554 - protein, 15 aa, Homo sapiens
DQVYPQYVIEYTEDK

SEQ ID NO: 4555 - protein, 13 aa, Homo sapiens
ASLEDAPVDDLTR

SEQ ID NO: 4556 - protein, 15 aa, Homo sapiens
ATDLGGTSQAGTSQR

SEQ ID NO: 4557 - protein, 9 aa, Homo sapiens
LHICDHFTR

SEQ ID NO: 4558 - protein, 8 aa, Homo sapiens
LLFYATSR

SEQ ID NO: 4559 - protein, 13 aa, Homo sapiens
LSEIHHLHPEYVR

SEQ ID NO: 4560 - protein, 18 aa, Homo sapiens
NSNVDSSYLESLYQSCPR

SEQ ID NO: 4561 - protein, 12 aa, Homo sapiens
SLTSWTNDQGAR

SEQ ID NO: 4562 - protein, 18 aa, Homo sapiens
VALVNDSLSDVTSTTSSR

SEQ ID NO: 4563 - protein, 8 aa, Homo sapiens
VHFHLPYR

SEQ ID NO: 4564 - protein, 10 aa, Homo sapiens
VMSCDSFPIR

SEQ ID NO: 4565 - protein, 18 aa, Homo sapiens
QRPLTASLQCNSTAQTEK

SEQ ID NO: 4566 - protein, 9 aa, Homo sapiens
KSAISDHLK

SEQ ID NO: 4567 - protein, 9 aa, Homo sapiens
VSVIQDFVK

SEQ ID NO: 4568 - protein, 10 aa, Homo sapiens
KAEFEEQNVR

SEQ ID NO: 4569 - protein, 14 aa, Homo sapiens
VTEFGGELHEDGGK

SEQ ID NO: 4570 - protein, 9 aa, Homo sapiens
AEFEEQNVR

SEQ ID NO: 4571 - protein, 19 aa, Homo sapiens
AYLPDGYENENQLLNSQDC

SEQ ID NO: 4572 - protein, 9 aa, Homo sapiens
FVVTAPPAR

SEQ ID NO: 4573 - protein, 14 aa, Homo sapiens
LFCTSCNVVLNHVR

SEQ ID NO: 4574 - protein, 10 aa, Homo sapiens
TALYVTPLDR

SEQ ID NO: 4575 - protein, 8 aa, Homo sapiens
THINYGVK

SEQ ID NO: 4576 - protein, 10 aa, Homo sapiens
GFYIYQEGVK

SEQ ID NO: 4577 - protein, 22 aa, Homo sapiens
KMGLVDQLVEPLGPGLKPPEER

SEQ ID NO: 4578 - protein, 17 aa, Homo sapiens
QFTPCQLLADHANSPNK

SEQ ID NO: 4579 - protein, 28 aa, Homo sapiens
KLDSLTTSFGFPVGAATLVDEVGVDVAK

SEQ ID NO: 4580 - protein, 9 aa, Homo sapiens
FVDLYGAQK

SEQ ID NO: 4581 - protein, 8 aa, Homo sapiens
FGELVMTK

SEQ ID NO: 4582 - protein, 21 aa, Homo sapiens
MGLVDQLVEPLGPGLKPPEER

SEQ ID NO: 4583 - protein, 22 aa, Homo sapiens
KTVLGTPEVLLGALPGAGGTQR

SEQ ID NO: 4584 - protein, 14 aa, Homo sapiens
TIEYLEEVAITFAK

SEQ ID NO: 4585 - protein, 9 aa, Homo sapiens
ILQEGVDPK

SEQ ID NO: 4586 - protein, 11 aa, Homo sapiens
MQLLEIITTEK

SEQ ID NO: 4587 - protein, 17 aa, Homo sapiens
TGIEQGSDAGYLCESQK

SEQ ID NO: 4588 - protein, 8 aa, Homo sapiens
GLYPAPLK

SEQ ID NO: 4589 - protein, 25 aa, Homo sapiens
SAVLISSKPGCFIAGADINMLAACK

SEQ ID NO: 4590 - protein, 12 aa, Homo sapiens
VIGMHYFSPVDK

SEQ ID NO: 4591 - protein, 15 aa, Homo sapiens
FGGGNPELLTQMVSK

SEQ ID NO: 4592 - protein, 13 aa, Homo sapiens
ALMGLYHGQVLCK

SEQ ID NO: 4593 - protein, 18 aa, Homo sapiens
DSIFSNLTGQLDYQGFEK

SEQ ID NO: 4594 - protein, 18 aa, Homo sapiens
QFTPCQLLADHANSPNKK

SEQ ID NO: 4595 - protein, 29 aa, Homo sapiens
EVEAVIPDHCIFASNTSALPISEIAAVSK

SEQ ID NO: 4596 - protein, 12 aa, Homo sapiens
DTSASAVAVGLK

SEQ ID NO: 4597 - protein, 8 aa, Homo sapiens
KALTSFER

SEQ ID NO: 4598 - protein, 15 aa, Homo sapiens
ADMVIEAVFEDLSLK

SEQ ID NO: 4599 - protein, 15 aa, Homo sapiens
KDLNSDMDSILASLK

SEQ ID NO: 4600 - protein, 21 aa, Homo sapiens
HLAILGAGLMGAGIAQVSVDK

SEQ ID NO: 4601 - protein, 14 aa, Homo sapiens
DLNSDMDSILASLK

SEQ ID NO: 4602 - protein, 7 aa, Homo sapiens
ALTSFER

SEQ ID NO: 4603 - protein, 11 aa, Homo sapiens
CLAPMMSEVIR

SEQ ID NO: 4604 - protein, 9 aa, Homo sapiens
DATLTALDR

SEQ ID NO: 4605 - protein, 9 aa, Homo sapiens
DGPGFYTTR

SEQ ID NO: 4606 - protein, 20 aa, Homo sapiens
ELHSEFSEVMNEIWASDQIR

SEQ ID NO: 4607 - protein, 7 aa, Homo sapiens
GDVAVVR

SEQ ID NO: 4608 - protein, 12 aa, Homo sapiens
LTAYAMTIPFVR

SEQ ID NO: 4609 - protein, 15 aa, Homo sapiens
MVGVPAALDMMLTGR

SEQ ID NO: 4610 - protein, 12 aa, Homo sapiens
SEVSSDEDIQFR

SEQ ID NO: 4611 - protein, 14 aa, Homo sapiens
TLQEVTQLSQEAQR

SEQ ID NO: 4612 - protein, 21 aa, Homo sapiens
TVLGTPEVLLGALPGAGGTQR

SEQ ID NO: 4613 - protein, 24 aa, Homo sapiens
DPGENYNLLGGVAGATPEVLQALK

SEQ ID NO: 4614 - protein, 16 aa, Homo sapiens
AQLDAAVTFGPSQVAR

SEQ ID NO: 4615 - protein, 17 aa, Homo sapiens
GGLPLEEVTVAEVLAAR

SEQ ID NO: 4616 - protein, 14 aa, Homo sapiens
QSLFFYPSYPDEVR

SEQ ID NO: 4617 - protein, 11 aa, Homo sapiens
TPLEELCLQIK

SEQ ID NO: 4618 - protein, 13 aa, Homo sapiens
IESPHPVDWNDTK

SEQ ID NO: 4619 - protein, 23 aa, Homo sapiens
SYIDRDSEYLLQENEPDGTLDQK

SEQ ID NO: 4620 - protein, 12 aa, Homo sapiens
NLQSDVLMTVVK

SEQ ID NO: 4621 - protein, 14 aa, Homo sapiens
ASLLDDYQLPEILR

SEQ ID NO: 4622 - protein, 13 aa, Homo sapiens
DCAVLSAIIDLIK

SEQ ID NO: 4623 - protein, 10 aa, Homo sapiens
LGGIAYFLSR

SEQ ID NO: 4624 - protein, 15 aa, Homo sapiens
LMDPPSNEAVLLSIR

SEQ ID NO: 4625 - protein, 10 aa, Homo sapiens
RISAISVAER

SEQ ID NO: 4626 - protein, 17 aa, Homo sapiens
SDHLTVVNAFEGWEEAR

SEQ ID NO: 4627 - protein, 18 aa, Homo sapiens
SSGGGYGGGPAGGHGGNR

SEQ ID NO: 4628 - protein, 10 aa, Homo sapiens
SYDYHQNWGR

SEQ ID NO: 4629 - protein, 15 aa, Homo sapiens
TTQVTQFILDNYIER

SEQ ID NO: 4630 - protein, 8 aa, Homo sapiens
YIEMQHFR

SEQ ID NO: 4631 - protein, 10 aa, Homo sapiens
NIFAILQSVK

SEQ ID NO: 4632 - protein, 12 aa, Homo sapiens
PVSQARPPPNQK

SEQ ID NO: 4633 - protein, 10 aa, Homo sapiens
SAPLEIGLQR

SEQ ID NO: 4634 - protein, 17 aa, Homo sapiens
AIVDCIISIVEENPESK

SEQ ID NO: 4635 - protein, 13 aa, Homo sapiens
SIPLAMAPVFEQK

SEQ ID NO: 4636 - protein, 22 aa, Homo sapiens
EAGLAHLCEFIEDCEHTVLATK

SEQ ID NO: 4637 - protein, 14 aa, Homo sapiens
QISSFVSEISDEFK

SEQ ID NO: 4638 - protein, 19 aa, Homo sapiens
ETEDGHESPLFDFIESCLR

SEQ ID NO: 4639 - protein, 21 aa, Homo sapiens
HPSAVTACNLDLENLITDSNR

SEQ ID NO: 4640 - protein, 10 aa, Homo sapiens
IFNETPINPR

SEQ ID NO: 4641 - protein, 17 aa, Homo sapiens
SSEPVQLTEAETEYFVR

SEQ ID NO: 4642 - protein, 12 aa, Homo sapiens
MQLGTVLPEFEK

SEQ ID NO: 4643 - protein, 9 aa, Homo sapiens
EGLLDPNVK

SEQ ID NO: 4644 - protein, 18 aa, Homo sapiens
GLSLQHIGRPHSGIDDCK

SEQ ID NO: 4645 - protein, 11 aa, Homo sapiens
AYSFAMGCWPK

SEQ ID NO: 4646 - protein, 19 aa, Homo sapiens
VMLPGQCQYLGLPVADYFK

SEQ ID NO: 4647 - protein, 13 aa, Homo sapiens
GALNPADITVLFK

SEQ ID NO: 4648 - protein, 11 aa, Homo sapiens
GYVLPVVSYIR

SEQ ID NO: 4649 - protein, 7 aa, Homo sapiens
IAQEVQR

SEQ ID NO: 4650 - protein, 9 aa, Homo sapiens
LDTDISLIR

SEQ ID NO: 4651 - protein, 14 aa, Homo sapiens
MFTSMDPPPVELIR

SEQ ID NO: 4652 - protein, 14 aa, Homo sapiens
SILGLPPLPEDSIK

SEQ ID NO: 4653 - protein, 21 aa, Homo sapiens
AHSNPDFLPVDNCLQSVLGQR

SEQ ID NO: 4654 - protein, 26 aa, Homo sapiens
LNDDWAYGNDLDARPWDFQAEECALR

SEQ ID NO: 4655 - protein, 17 aa, Homo sapiens
YTSIAEVQAQMEEEYLR

SEQ ID NO: 4656 - protein, 12 aa, Homo sapiens
DGVMFQIDQATK

SEQ ID NO: 4657 - protein, 9 aa, Homo sapiens
FFDIQLGIK

SEQ ID NO: 4658 - protein, 11 aa, Homo sapiens
ALLSYDGLNQR

SEQ ID NO: 4659 - protein, 10 aa, Homo sapiens
QVMYQQSSGR

SEQ ID NO: 4660 - protein, 14 aa, Homo sapiens
VKGGGHVAQIYAIR

SEQ ID NO: 4661 - protein, 8 aa, Homo sapiens
ALVAYYQK

SEQ ID NO: 4662 - protein, 14 aa, Homo sapiens
PSKGPLQSVQVFGR

SEQ ID NO: 4663 - protein, 10 aa, Homo sapiens
LLEPVLLLGK

SEQ ID NO: 4664 - protein, 11 aa, Homo sapiens
EIKDILIQYDR

SEQ ID NO: 4665 - protein, 12 aa, Homo sapiens
KEIKDILIQYDR

SEQ ID NO: 4666 - protein, 7 aa, Homo sapiens
FAGVDIR

SEQ ID NO: 4667 - protein, 12 aa, Homo sapiens
GGGHVAQIYAIR

SEQ ID NO: 4668 - protein, 11 aa, Homo sapiens
GPLQSVQVFGR

SEQ ID NO: 4669 - protein, 8 aa, Homo sapiens
PLEMIEPR

SEQ ID NO: 4670 - protein, 8 aa, Homo sapiens
TLLVADPR

SEQ ID NO: 4671 - protein, 12 aa, Homo sapiens
VNGRPLEMIEPR

SEQ ID NO: 4672 - protein, 16 aa, Homo sapiens
AGTEEAIVYSDIDLKK

SEQ ID NO: 4673 - protein, 17 aa, Homo sapiens
LYNTCAVFGPDGTLLAK

SEQ ID NO: 4674 - protein, 15 aa, Homo sapiens
IVSLPECFNSPYGAK

SEQ ID NO: 4675 - protein, 11 aa, Homo sapiens
IHLFDIDVPGK

SEQ ID NO: 4676 - protein, 18 aa, Homo sapiens
ECSIYLIGGSIPEEDAGK

SEQ ID NO: 4677 - protein, 21 aa, Homo sapiens
ASYVAWGHSTVVNPWGEVLAK

SEQ ID NO: 4678 - protein, 15 aa, Homo sapiens
AVDNQVYVATASPAR

SEQ ID NO: 4679 - protein, 11 aa, Homo sapiens
FAELAQIYAQR

SEQ ID NO: 4680 - protein, 25 aa, Homo sapiens
GCQLLVYPGAFNLTTGPAHWELLQR

SEQ ID NO: 4681 - protein, 17 aa, Homo sapiens
TLSPGDSFSTFDTPYCR

SEQ ID NO: 4682 - protein, 10 aa, Homo sapiens
VGLGICYDMR

SEQ ID NO: 4683 - protein, 18 aa, Homo sapiens
VGIALKPFLPQLQTTFTK

SEQ ID NO: 4684 - protein, 17 aa, Homo sapiens
DGYIMMFNYLPITFGDK

SEQ ID NO: 4685 - protein, 13 aa, Homo sapiens
AALLETLSLLLAK

SEQ ID NO: 4686 - protein, 7 aa, Homo sapiens
LTVVAQK

SEQ ID NO: 4687 - protein, 15 aa, Homo sapiens
LDAGNQLALIEELHK

SEQ ID NO: 4688 - protein, 16 aa, Homo sapiens
IKNPFLSLAACVMPSR

SEQ ID NO: 4689 - protein, 9 aa, Homo sapiens
CGLALALNK

SEQ ID NO: 4690 - protein, 14 aa, Homo sapiens
HLGVILPAVMLALK

SEQ ID NO: 4691 - protein, 16 aa, Homo sapiens
EGALFAFEMLCTMLGK

SEQ ID NO: 4692 - protein, 9 aa, Homo sapiens
SALLDFYMK

SEQ ID NO: 4693 - protein, 11 aa, Homo sapiens
GAAYGLAGLVK

SEQ ID NO: 4694 - protein, 15 aa, Homo sapiens
QQEMMAALTDAIQDK

SEQ ID NO: 4695 - protein, 11 aa, Homo sapiens
GEHVPGFCLPK

SEQ ID NO: 4696 - protein, 10 aa, Homo sapiens
KLLSSLGGFK

SEQ ID NO: 4697 - protein, 7 aa, Homo sapiens
ALLDNTK

SEQ ID NO: 4698 - protein, 13 aa, Homo sapiens
QCSDSSAMESLTK

SEQ ID NO: 4699 - protein, 14 aa, Homo sapiens
LMQQLLESDKYAER

SEQ ID NO: 4700 - protein, 9 aa, Homo sapiens
DLILPTIQK

SEQ ID NO: 4701 - protein, 12 aa, Homo sapiens
HLFAILGGSEGK

SEQ ID NO: 4702 - protein, 13 aa, Homo sapiens
SIIQSAQQDSIKK

SEQ ID NO: 4703 - protein, 8 aa, Homo sapiens
LMEIYQEK

SEQ ID NO: 4704 - protein, 10 aa, Homo sapiens
LLKPECVLDK

SEQ ID NO: 4705 - protein, 11 aa, Homo sapiens
EGVLTGSPEQK

SEQ ID NO: 4706 - protein, 12 aa, Homo sapiens
AYSDQAIVNLLK

SEQ ID NO: 4707 - protein, 23 aa, Homo sapiens
AASQSTQVPTITEGVAAALLLLK

SEQ ID NO: 4708 - protein, 9 aa, Homo sapiens
VVLPYLVPK

SEQ ID NO: 4709 - protein, 11 aa, Homo sapiens
KGVTSILPVLR

SEQ ID NO: 4710 - protein, 15 aa, Homo sapiens
CMLDAALATLNTHGK

SEQ ID NO: 4711 - protein, 18 aa, Homo sapiens
SGAAQGLAEVMAGLGVEK

SEQ ID NO: 4712 - protein, 14 aa, Homo sapiens
NLLHSLQSSGIGSK

SEQ ID NO: 4713 - protein, 10 aa, Homo sapiens
LMQQLLESDK

SEQ ID NO: 4714 - protein, 13 aa, Homo sapiens
HHIETGGGQLPAK

SEQ ID NO: 4715 - protein, 16 aa, Homo sapiens
VLQEALCVISGVPGLK

SEQ ID NO: 4716 - protein, 10 aa, Homo sapiens
LAHGLLEELK

SEQ ID NO: 4717 - protein, 19 aa, Homo sapiens
ALQAAIQQLAEAQPEATAK

SEQ ID NO: 4718 - protein, 12 aa, Homo sapiens
SIIQSAQQDSIK

SEQ ID NO: 4719 - protein, 8 aa, Homo sapiens
GLGILSLK

SEQ ID NO: 4720 - protein, 9 aa, Homo sapiens
FVIQGAGAK

SEQ ID NO: 4721 - protein, 19 aa, Homo sapiens
VLPLEALVTDAGEVTEAGK

SEQ ID NO: 4722 - protein, 16 aa, Homo sapiens
MAAQIIGNMYSLTDQK

SEQ ID NO: 4723 - protein, 12 aa, Homo sapiens
LSSFWQLIVDEK

SEQ ID NO: 4724 - protein, 19 aa, Homo sapiens
MTTETASEDDNFGTAQSNK

SEQ ID NO: 4725 - protein, 12 aa, Homo sapiens
AVMSNLSAHGVK

SEQ ID NO: 4726 - protein, 21 aa, Homo sapiens
GEPGAAPLSAPAFSLVFPFLK

SEQ ID NO: 4727 - protein, 15 aa, Homo sapiens
ENVNSLLPVFEEFLK

SEQ ID NO: 4728 - protein, 22 aa, Homo sapiens
LFNDSSPVVLEESWDALNAITK

SEQ ID NO: 4729 - protein, 14 aa, Homo sapiens
DLAPYLPSVTPGLK

SEQ ID NO: 4730 - protein, 16 aa, Homo sapiens
QLDDEEVSEFALDGLK

SEQ ID NO: 4731 - protein, 8 aa, Homo sapiens
YLSHSEFK

SEQ ID NO: 4732 - protein, 11 aa, Homo sapiens
LTEVLTDSHVK

SEQ ID NO: 4733 - protein, 11 aa, Homo sapiens
QGEEVFQSLSK

SEQ ID NO: 4734 - protein, 16 aa, Homo sapiens
KLDAGNQLALIEELHK

SEQ ID NO: 4735 - protein, 12 aa, Homo sapiens
QLSSCLPNIVPK

SEQ ID NO: 4736 - protein, 8 aa, Homo sapiens
ADYTSHLR

SEQ ID NO: 4737 - protein, 10 aa, Homo sapiens
AIITALGVER

SEQ ID NO: 4738 - protein, 10 aa, Homo sapiens
ALCDPLEEVR

SEQ ID NO: 4739 - protein, 7 aa, Homo sapiens
ALGLVIR

SEQ ID NO: 4740 - protein, 12 aa, Homo sapiens
ALGTLVSHVTLR

SEQ ID NO: 4741 - protein, 9 aa, Homo sapiens
ALVAVLLSR

SEQ ID NO: 4742 - protein, 8 aa, Homo sapiens
AMEDPGVR

SEQ ID NO: 4743 - protein, 11 aa, Homo sapiens
ASLLDPVPEVR

SEQ ID NO: 4744 - protein, 13 aa, Homo sapiens
AVMLLHTHTITSR

SEQ ID NO: 4745 - protein, 8 aa, Homo sapiens
DTMLQALR

SEQ ID NO: 4746 - protein, 9 aa, Homo sapiens
EMLQAQLDR

SEQ ID NO: 4747 - protein, 7 aa, Homo sapiens
GMGFLMR

SEQ ID NO: 4748 - protein, 8 aa, Homo sapiens
HLDQIIPR

SEQ ID NO: 4749 - protein, 9 aa, Homo sapiens
IDPEAFITR

SEQ ID NO: 4750 - protein, 15 aa, Homo sapiens
ILDVASLEVLNEVNR

SEQ ID NO: 4751 - protein, 14 aa, Homo sapiens
ILPEIIPILEEGLR

SEQ ID NO: 4752 - protein, 9 aa, Homo sapiens
IPIAVSGVR

SEQ ID NO: 4753 - protein, 8 aa, Homo sapiens
IVVSNTPR

SEQ ID NO: 4754 - protein, 8 aa, Homo sapiens
LFLDHPHR

SEQ ID NO: 4755 - protein, 27 aa, Homo sapiens
LGTPDEQLEMANCQAVILSVEDDTGHR

SEQ ID NO: 4756 - protein, 12 aa, Homo sapiens
LLTWVIGTGSPR

SEQ ID NO: 4757 - protein, 10 aa, Homo sapiens
LMDEAVLALR

SEQ ID NO: 4758 - protein, 20 aa, Homo sapiens
LTSADALRPSVVSITGPLIR

SEQ ID NO: 4759 - protein, 9 aa, Homo sapiens
LTTPPVNTR

SEQ ID NO: 4760 - protein, 13 aa, Homo sapiens
LYRPPPVLDALGR

SEQ ID NO: 4761 - protein, 12 aa, Homo sapiens
NAPNDASYDAVR

SEQ ID NO: 4762 - protein, 18 aa, Homo sapiens
NIVSLLLSMLGHDEDNTR

SEQ ID NO: 4763 - protein, 20 aa, Homo sapiens
NPEILAIAPVLLDALTDPSR

SEQ ID NO: 4764 - protein, 13 aa, Homo sapiens
QAGAEALSQAVAR

SEQ ID NO: 4765 - protein, 8 aa, Homo sapiens
SDTQLVVR

SEQ ID NO: 4766 - protein, 8 aa, Homo sapiens
SLVSGLIR

SEQ ID NO: 4767 - protein, 7 aa, Homo sapiens
SPEVGMR

SEQ ID NO: 4768 - protein, 7 aa, Homo sapiens
SPLAAPR

SEQ ID NO: 4769 - protein, 7 aa, Homo sapiens
TLGDLVR

SEQ ID NO: 4770 - protein, 11 aa, Homo sapiens
VDENGPELLPR

SEQ ID NO: 4771 - protein, 8 aa, Homo sapiens
VDIAPHVR

SEQ ID NO: 4772 - protein, 13 aa, Homo sapiens
VDPLFTELLNGIR

SEQ ID NO: 4773 - protein, 13 aa, Homo sapiens
VISESPPDQWEAR

SEQ ID NO: 4774 - protein, 15 aa, Homo sapiens
VLAFLSSVAGDALTR

SEQ ID NO: 4775 - protein, 19 aa, Homo sapiens
VLPQLISTITASVQNPALR

SEQ ID NO: 4776 - protein, 11 aa, Homo sapiens
YLLDSCAPLLR

SEQ ID NO: 4777 - protein, 17 aa, Homo sapiens
YSSDVQEMILSSATADR

SEQ ID NO: 4778 - protein, 26 aa, Homo sapiens
YSSDVQEMILSSATADRIPIAVSGVR

SEQ ID NO: 4779 - protein, 7 aa, Homo sapiens
GIEFDWK

SEQ ID NO: 4780 - protein, 12 aa, Homo sapiens
CSGLSEYNAFWK

SEQ ID NO: 4781 - protein, 17 aa, Homo sapiens
ASVDVADLIGLNLVMSR

SEQ ID NO: 4782 - protein, 10 aa, Homo sapiens
EIFSVLDLMK

SEQ ID NO: 4783 - protein, 15 aa, Homo sapiens
GQIQAVASPDDPIRR

SEQ ID NO: 4784 - protein, 12 aa, Homo sapiens
NISPVVFQLWGK

SEQ ID NO: 4785 - protein, 20 aa, Homo sapiens
MYGAQEDGSVGEGDLSCILK

SEQ ID NO: 4786 - protein, 8 aa, Homo sapiens
GLGLKPEK

SEQ ID NO: 4787 - protein, 10 aa, Homo sapiens
TLDTIQLAFK

SEQ ID NO: 4788 - protein, 23 aa, Homo sapiens
TCLITFKPGAFIPGAPVQPVVLR

SEQ ID NO: 4789 - protein, 13 aa, Homo sapiens
AAPASSAGASDAR

SEQ ID NO: 4790 - protein, 10 aa, Homo sapiens
EPEQPPALWR

SEQ ID NO: 4791 - protein, 8 aa, Homo sapiens
ITFADFHR

SEQ ID NO: 4792 - protein, 12 aa, Homo sapiens
LPADTCLLEFAR

SEQ ID NO: 4793 - protein, 8 aa, Homo sapiens
NPFVHELR

SEQ ID NO: 4794 - protein, 15 aa, Homo sapiens
TALGVAELTVTDLFR

SEQ ID NO: 4795 - protein, 10 aa, Homo sapiens
TMWFAGGFHR

SEQ ID NO: 4796 - protein, 15 aa, Homo sapiens
WPQIMIFPEGTCTNR

SEQ ID NO: 4797 - protein, 25 aa, Homo sapiens
IEGCIIGFDEYMNLVLDDAEEIHSK

SEQ ID NO: 4798 - protein, 16 aa, Homo sapiens
IMLKGDNITLLQSVSN

SEQ ID NO: 4799 - protein, 12 aa, Homo sapiens
IQVWLYEQVNMR

SEQ ID NO: 4800 - protein, 11 aa, Homo sapiens
VMVQPINLIFR

SEQ ID NO: 4801 - protein, 24 aa, Homo sapiens
LVGGADLMLPGLVMPPAGLPQVQK

SEQ ID NO: 4802 - protein, 21 aa, Homo sapiens
APVAIGVAAMSTAEMLTSGLK

SEQ ID NO: 4803 - protein, 29 aa, Homo sapiens
ADVTTAFPTLGTDQVSELVPGKEELNIVK

SEQ ID NO: 4804 - protein, 20 aa, Homo sapiens
SSPPSIAPLALDSADLSEEK

SEQ ID NO: 4805 - protein, 12 aa, Homo sapiens
GDLCAISLVGNR

SEQ ID NO: 4806 - protein, 21 aa, Homo sapiens
ITSFVIPEPSPTSQTIQEGSR

SEQ ID NO: 4807 - protein, 9 aa, Homo sapiens
LPWDSLLTR

SEQ ID NO: 4808 - protein, 19 aa, Homo sapiens
NLEAYGLDPYSVAAILQQR

SEQ ID NO: 4809 - protein, 12 aa, Homo sapiens
SLSEAPEDTSTR

SEQ ID NO: 4810 - protein, 19 aa, Homo sapiens
GIPPLSLRPANPLGIEIEK

SEQ ID NO: 4811 - protein, 10 aa, Homo sapiens
ITQVSMASLK

SEQ ID NO: 4812 - protein, 20 aa, Homo sapiens
ADPIVGSLEPGIYAGYFDWK

SEQ ID NO: 4813 - protein, 12 aa, Homo sapiens
LLETPSTLHDQK

SEQ ID NO: 4814 - protein, 11 aa, Homo sapiens
FLFNLPLNIER

SEQ ID NO: 4815 - protein, 11 aa, Homo sapiens
VIEAVSEELSR

SEQ ID NO: 4816 - protein, 17 aa, Homo sapiens
QPNSGIENFLASLNISK

SEQ ID NO: 4817 - protein, 9 aa, Homo sapiens
VQEIITWLK

SEQ ID NO: 4818 - protein, 12 aa, Homo sapiens
QVVPFVYQTIVK

SEQ ID NO: 4819 - protein, 16 aa, Homo sapiens
GAVLPQEISQVNQHHK

SEQ ID NO: 4820 - protein, 11 aa, Homo sapiens
ALYFCGFPTLK

SEQ ID NO: 4821 - protein, 10 aa, Homo sapiens
APELFSYIAK

SEQ ID NO: 4822 - protein, 11 aa, Homo sapiens
MQYFQPTIQEK

SEQ ID NO: 4823 - protein, 18 aa, Homo sapiens
DNLEDETEDDDLFETEFR

SEQ ID NO: 4824 - protein, 10 aa, Homo sapiens
ENFSVPVGLR

SEQ ID NO: 4825 - protein, 15 aa, Homo sapiens
FDSNCITPGTEFMAR

SEQ ID NO: 4826 - protein, 9 aa, Homo sapiens
FTGSIFIGR

SEQ ID NO: 4827 - protein, 11 aa, Homo sapiens
FYLEEPPGTQK

SEQ ID NO: 4828 - protein, 16 aa, Homo sapiens
ICSLVGMPQPDFSFLR

SEQ ID NO: 4829 - protein, 14 aa, Homo sapiens
LPTSALVNLSHGSR

SEQ ID NO: 4830 - protein, 12 aa, Homo sapiens
QIANEIPVSSNR

SEQ ID NO: 4831 - protein, 11 aa, Homo sapiens
SGVQVFQQSSR

SEQ ID NO: 4832 - protein, 9 aa, Homo sapiens
TLDDLFPLR

SEQ ID NO: 4833 - protein, 14 aa, Homo sapiens
YLNEAAGVAAEEAR

SEQ ID NO: 4834 - protein, 23 aa, Homo sapiens
KDQVAYLIQQNVIPPFCNLLTVK

SEQ ID NO: 4835 - protein, 9 aa, Homo sapiens
NPPIDDLIK

SEQ ID NO: 4836 - protein, 21 aa, Homo sapiens
MAEDEAETIGNLIEECGGLEK

SEQ ID NO: 4837 - protein, 14 aa, Homo sapiens
IEQLQNHENEDIYK

SEQ ID NO: 4838 - protein, 15 aa, Homo sapiens
LLSSDRNPPIDDLIK

SEQ ID NO: 4839 - protein, 17 aa, Homo sapiens
DAQVVQVVLDGLSNILK

SEQ ID NO: 4840 - protein, 14 aa, Homo sapiens
EAAWAISNLTISGR

SEQ ID NO: 4841 - protein, 28 aa, Homo sapiens
LLHSPHQNVCEQAVWALGNIIGDGPQCR

SEQ ID NO: 4842 - protein, 18 aa, Homo sapiens
NVPHEDICEDSDIDGDYR

SEQ ID NO: 4843 - protein, 13 aa, Homo sapiens
SGILPILVHCLER

SEQ ID NO: 4844 - protein, 29 aa, Homo sapiens
VQNTSLEAIVQNASSDNQGIQLSAVQAAR

SEQ ID NO: 4845 - protein, 13 aa, Homo sapiens
TPTFAGGLFSISK

SEQ ID NO: 4846 - protein, 17 aa, Homo sapiens
TKLEAQAYTAYLSGMLR

SEQ ID NO: 4847 - protein, 13 aa, Homo sapiens
YANEVNSDAGAFK

SEQ ID NO: 4848 - protein, 7 aa, Homo sapiens
FEHQEWK

SEQ ID NO: 4849 - protein, 12 aa, Homo sapiens
ALLQQQPEDDSK

SEQ ID NO: 4850 - protein, 22 aa, Homo sapiens
IFLLGLADNEAAIVQAESEETK

SEQ ID NO: 4851 - protein, 18 aa, Homo sapiens
GAGGEENKENERPSAGSK

SEQ ID NO: 4852 - protein, 13 aa, Homo sapiens
ALLQQQPEDDSKR

SEQ ID NO: 4853 - protein, 24 aa, Homo sapiens
IFLLGLADNEAAIVQAESEETKER

SEQ ID NO: 4854 - protein, 8 aa, Homo sapiens
SGLTGYIK

SEQ ID NO: 4855 - protein, 11 aa, Homo sapiens
KVTEELLTDNR

SEQ ID NO: 4856 - protein, 15 aa, Homo sapiens
VSNLQYLHSYLTYIK

SEQ ID NO: 4857 - protein, 13 aa, Homo sapiens
FETFCLDPSLVTK

SEQ ID NO: 4858 - protein, 13 aa, Homo sapiens
DLPDVQELITQVR

SEQ ID NO: 4859 - protein, 15 aa, Homo sapiens
LEAQAYTAYLSGMLR

SEQ ID NO: 4860 - protein, 10 aa, Homo sapiens
LFESMLSECR

SEQ ID NO: 4861 - protein, 11 aa, Homo sapiens
QAATMSEVEWR

SEQ ID NO: 4862 - protein, 26 aa, Homo sapiens
QVPGGGGGGGSGGGGGSGGGGSGGGR

SEQ ID NO: 4863 - protein, 9 aa, Homo sapiens
SPRPQDLIR

SEQ ID NO: 4864 - protein, 10 aa, Homo sapiens
VTEELLTDNR

SEQ ID NO: 4865 - protein, 10 aa, Homo sapiens
WSEALVLYDR

SEQ ID NO: 4866 - protein, 19 aa, Homo sapiens
YCAYNIGDQSAINELMQMR

SEQ ID NO: 4867 - protein, 9 aa, Homo sapiens
VCVIDEIGK

SEQ ID NO: 4868 - protein, 10 aa, Homo sapiens
VGLEPPPGKR

SEQ ID NO: 4869 - protein, 12 aa, Homo sapiens
HVFLTGPPGVGK

SEQ ID NO: 4870 - protein, 11 aa, Homo sapiens
GKPLALVEEIR

SEQ ID NO: 4871 - protein, 18 aa, Homo sapiens
QTLSTPGTIILGTIPVPK

SEQ ID NO: 4872 - protein, 12 aa, Homo sapiens
IGFDVVTLSGTR

SEQ ID NO: 4873 - protein, 15 aa, Homo sapiens
NHLLPDIVTCVQSSR

SEQ ID NO: 4874 - protein, 13 aa, Homo sapiens
RIGFDVVTLSGTR

SEQ ID NO: 4875 - protein, 15 aa, Homo sapiens
SSGVPVDGFYTEEVR

SEQ ID NO: 4876 - protein, 20 aa, Homo sapiens
VGQYVVDLTSFEQLALPVLR

SEQ ID NO: 4877 - protein, 22 aa, Homo sapiens
NHTSALGLLDVAQALEQNHSLK

SEQ ID NO: 4878 - protein, 11 aa, Homo sapiens
VDEGVEEFFSK

SEQ ID NO: 4879 - protein, 12 aa, Homo sapiens
ELSLAGNLLDDR

SEQ ID NO: 4880 - protein, 19 aa, Homo sapiens
GEELGGAEGDTSSPDPAGR

SEQ ID NO: 4881 - protein, 17 aa, Homo sapiens
GLPELLPEQLLQDAFTR

SEQ ID NO: 4882 - protein, 13 aa, Homo sapiens
HFSLGDFSHLGSR

SEQ ID NO: 4883 - protein, 21 aa, Homo sapiens
IVQLMQDDDCPLQSLSVAESR

SEQ ID NO: 4884 - protein, 14 aa, Homo sapiens
LAQALAGHSSSGLR

SEQ ID NO: 4885 - protein, 19 aa, Homo sapiens
LWAPEEDPATEGGATPVPR

SEQ ID NO: 4886 - protein, 15 aa, Homo sapiens
QDIQDFTQATLDTAR

SEQ ID NO: 4887 - protein, 10 aa, Homo sapiens
SPPSPATDQR

SEQ ID NO: 4888 - protein, 11 aa, Homo sapiens
TLGQQLNAELR

SEQ ID NO: 4889 - protein, 19 aa, Homo sapiens
TSPSPDSLGLPEDPCLGPR

SEQ ID NO: 4890 - protein, 9 aa, Homo sapiens
AAAAVSSAK

SEQ ID NO: 4891 - protein, 9 aa, Homo sapiens
VIAHSEYQK

SEQ ID NO: 4892 - protein, 12 aa, Homo sapiens
IESPEEISLLPK

SEQ ID NO: 4893 - protein, 10 aa, Homo sapiens
FQSNHMDMVR

SEQ ID NO: 4894 - protein, 13 aa, Homo sapiens
ECEGIVPVPLAEK

SEQ ID NO: 4895 - protein, 21 aa, Homo sapiens
HPLTQELKECEGIVPVPLAEK

SEQ ID NO: 4896 - protein, 8 aa, Homo sapiens
YELALILK

SEQ ID NO: 4897 - protein, 13 aa, Homo sapiens
AMQRPETAATLKR

SEQ ID NO: 4898 - protein, 12 aa, Homo sapiens
AMQRPETAATLK

SEQ ID NO: 4899 - protein, 8 aa, Homo sapiens
DLENLGER

SEQ ID NO: 4900 - protein, 10 aa, Homo sapiens
ISAHSQQHNR

SEQ ID NO: 4901 - protein, 8 aa, Homo sapiens
TIEALMDR

SEQ ID NO: 4902 - protein, 12 aa, Homo sapiens
KLMHVAYEEFEK

SEQ ID NO: 4903 - protein, 18 aa, Homo sapiens
DAATIMQPYFTSNGLVTK

SEQ ID NO: 4904 - protein, 10 aa, Homo sapiens
AERPDVDEKR

SEQ ID NO: 4905 - protein, 10 aa, Homo sapiens
LFLTMEINPK

SEQ ID NO: 4906 - protein, 30 aa, Homo sapiens
GEAVDEGEIAENLPEQEILIQSVCETMVPK

SEQ ID NO: 4907 - protein, 15 aa, Homo sapiens
DYIPVDQEELRDYVK

SEQ ID NO: 4908 - protein, 14 aa, Homo sapiens
LLAESVTEVEIFGK

SEQ ID NO: 4909 - protein, 17 aa, Homo sapiens
MQMLEDEDDLAYAETEK

SEQ ID NO: 4910 - protein, 14 aa, Homo sapiens
NVHLAPGWLMQLEK

SEQ ID NO: 4911 - protein, 13 aa, Homo sapiens
KLEHLITELVHQR

SEQ ID NO: 4912 - protein, 8 aa, Homo sapiens
SNSLAFIK

SEQ ID NO: 4913 - protein, 8 aa, Homo sapiens
GWDDLFNK

SEQ ID NO: 4914 - protein, 10 aa, Homo sapiens
EHINSVSAMK

SEQ ID NO: 4915 - protein, 8 aa, Homo sapiens
YAPLGWSK

SEQ ID NO: 4916 - protein, 8 aa, Homo sapiens
GVWSELSK

SEQ ID NO: 4917 - protein, 14 aa, Homo sapiens
TPNGVVLAPVQLGK

SEQ ID NO: 4918 - protein, 7 aa, Homo sapiens
SQELEVK

SEQ ID NO: 4919 - protein, 15 aa, Homo sapiens
VFEEDALSWEDKLNR

SEQ ID NO: 4920 - protein, 17 aa, Homo sapiens
DFPLNDLLSATELDKIR

SEQ ID NO: 4921 - protein, 15 aa, Homo sapiens
KFLSDPQVHTVLVER

SEQ ID NO: 4922 - protein, 16 aa, Homo sapiens
ILDDDTIITTLENLKR

SEQ ID NO: 4923 - protein, 18 aa, Homo sapiens
EDLDKVEPAVIEAQNAVK

SEQ ID NO: 4924 - protein, 12 aa, Homo sapiens
KEFGPVVIDYGK

SEQ ID NO: 4925 - protein, 10 aa, Homo sapiens
SLETCMYDHK

SEQ ID NO: 4926 - protein, 11 aa, Homo sapiens
VKDDIESLHDK

SEQ ID NO: 4927 - protein, 14 aa, Homo sapiens
QALETVNDYNPLMK

SEQ ID NO: 4928 - protein, 11 aa, Homo sapiens
EGTEAWEAAMK

SEQ ID NO: 4929 - protein, 11 aa, Homo sapiens
NTISLLVAGLK

SEQ ID NO: 4930 - protein, 18 aa, Homo sapiens
MQMLEDEDDLAYAETEKK

SEQ ID NO: 4931 - protein, 22 aa, Homo sapiens
YPLIIDPSGQATEFIMNEYKDR

SEQ ID NO: 4932 - protein, 9 aa, Homo sapiens
EVDGLDVSK

SEQ ID NO: 4933 - protein, 12 aa, Homo sapiens
KYTGEDFDEDLR

SEQ ID NO: 4934 - protein, 24 aa, Homo sapiens
KLVPLLLEDGGEAPAALEAALEEK

SEQ ID NO: 4935 - protein, 20 aa, Homo sapiens
YPLIIDPSGQATEFIMNEYK

SEQ ID NO: 4936 - protein, 7 aa, Homo sapiens
LADLLGK

SEQ ID NO: 4937 - protein, 12 aa, Homo sapiens
WTDENIDTVALK

SEQ ID NO: 4938 - protein, 10 aa, Homo sapiens
VQYPQSQACK

SEQ ID NO: 4939 - protein, 10 aa, Homo sapiens
SVLVSAGNVK

SEQ ID NO: 4940 - protein, 9 aa, Homo sapiens
IMFEVQDLK

SEQ ID NO: 4941 - protein, 13 aa, Homo sapiens
SSLQSQCLNEVLK

SEQ ID NO: 4942 - protein, 9 aa, Homo sapiens
LYQEMFAWK

SEQ ID NO: 4943 - protein, 19 aa, Homo sapiens
AKEALELTDTGLLSGSEER

SEQ ID NO: 4944 - protein, 10 aa, Homo sapiens
KYEFGESDLR

SEQ ID NO: 4945 - protein, 20 aa, Homo sapiens
MDLEKPNYIVPDYMPVVYDK

SEQ ID NO: 4946 - protein, 24 aa, Homo sapiens
VLQLYQITQINHGLMMVGPSGSGK

SEQ ID NO: 4947 - protein, 10 aa, Homo sapiens
PILYSNWLSK

SEQ ID NO: 4948 - protein, 23 aa, Homo sapiens
LVPLLLEDGGEAPAALEAALEEK

SEQ ID NO: 4949 - protein, 13 aa, Homo sapiens
ESPEVLLTLDILK

SEQ ID NO: 4950 - protein, 25 aa, Homo sapiens
VAEVLFDAADANAIEEVNLAYENVK

SEQ ID NO: 4951 - protein, 13 aa, Homo sapiens
AWTQVLLGQAEDK

SEQ ID NO: 4952 - protein, 24 aa, Homo sapiens
VLRPQVTAVAQQNQGEVPEPQDMK

SEQ ID NO: 4953 - protein, 16 aa, Homo sapiens
QTDVLQQLSIQMANAK

SEQ ID NO: 4954 - protein, 13 aa, Homo sapiens
WAIAQLNYADMLK

SEQ ID NO: 4955 - protein, 13 aa, Homo sapiens
VLLTTQGVDMISK

SEQ ID NO: 4956 - protein, 13 aa, Homo sapiens
FQSISTEFLALMK

SEQ ID NO: 4957 - protein, 14 aa, Homo sapiens
LEGVEGVAHIIDPK

SEQ ID NO: 4958 - protein, 13 aa, Homo sapiens
QDLADVVQVCEGK

SEQ ID NO: 4959 - protein, 17 aa, Homo sapiens
FYFVGDEDLLEIIGNSK

SEQ ID NO: 4960 - protein, 15 aa, Homo sapiens
QLQNISLAAASGGAK

SEQ ID NO: 4961 - protein, 11 aa, Homo sapiens
TVENIKDPLFR

SEQ ID NO: 4962 - protein, 8 aa, Homo sapiens
EGEEVMFK

SEQ ID NO: 4963 - protein, 13 aa, Homo sapiens
LGGSPFGPAGTGK

SEQ ID NO: 4964 - protein, 12 aa, Homo sapiens
TSAPITCELLNK

SEQ ID NO: 4965 - protein, 12 aa, Homo sapiens
VNFLPEIITLSK

SEQ ID NO: 4966 - protein, 16 aa, Homo sapiens
QPQGHLLLIGVSGAGK

SEQ ID NO: 4967 - protein, 15 aa, Homo sapiens
DFPLNDLLSATELDK

SEQ ID NO: 4968 - protein, 10 aa, Homo sapiens
ASLACGPMVK

SEQ ID NO: 4969 - protein, 9 aa, Homo sapiens
SNLPDNLKK

SEQ ID NO: 4970 - protein, 9 aa, Homo sapiens
INMLVIELK

SEQ ID NO: 4971 - protein, 12 aa, Homo sapiens
VMSQEIQEQLHK

SEQ ID NO: 4972 - protein, 10 aa, Homo sapiens
TSFLDDAFRK

SEQ ID NO: 4973 - protein, 10 aa, Homo sapiens
SLLQALNEVK

SEQ ID NO: 4974 - protein, 29 aa, Homo sapiens
SRQELEQHSVDTASTSDAVTFITYVQSLK

SEQ ID NO: 4975 - protein, 10 aa, Homo sapiens
INEWLTLVEK

SEQ ID NO: 4976 - protein, 15 aa, Homo sapiens
ILDDDTIITTLENLK

SEQ ID NO: 4977 - protein, 8 aa, Homo sapiens
TSDQTWVK

SEQ ID NO: 4978 - protein, 8 aa, Homo sapiens
RVEDVLGK

SEQ ID NO: 4979 - protein, 13 aa, Homo sapiens
DLPPVSGSIIWAK

SEQ ID NO: 4980 - protein, 10 aa, Homo sapiens
VPQIEVETHK

SEQ ID NO: 4981 - protein, 11 aa, Homo sapiens
EFGPVVIDYGK

SEQ ID NO: 4982 - protein, 15 aa, Homo sapiens
TPVIDADKPVSSQLR

SEQ ID NO: 4983 - protein, 20 aa, Homo sapiens
WQASSLPADDLCTENAIMLK

SEQ ID NO: 4984 - protein, 16 aa, Homo sapiens
EVWNTYELDLVNYQNK

SEQ ID NO: 4985 - protein, 23 aa, Homo sapiens
ALPDMEVVGLNFSSATTPELLLK

SEQ ID NO: 4986 - protein, 15 aa, Homo sapiens
SACDTVDTWLDDTAK

SEQ ID NO: 4987 - protein, 10 aa, Homo sapiens
TPVSITEHPK

SEQ ID NO: 4988 - protein, 9 aa, Homo sapiens
AERPDVDEK

SEQ ID NO: 4989 - protein, 11 aa, Homo sapiens
LAETVFNFQEK

SEQ ID NO: 4990 - protein, 18 aa, Homo sapiens
GKEDEGEEAASPMLQIQR

SEQ ID NO: 4991 - protein, 14 aa, Homo sapiens
DSAIQQQVANLQMK

SEQ ID NO: 4992 - protein, 18 aa, Homo sapiens
FGQMLGSNMTEFHSQISK

SEQ ID NO: 4993 - protein, 13 aa, Homo sapiens
FNYGFEYLGVQDK

SEQ ID NO: 4994 - protein, 13 aa, Homo sapiens
EGLMLDSHEELYK

SEQ ID NO: 4995 - protein, 11 aa, Homo sapiens
IFVFEPPPGVK

SEQ ID NO: 4996 - protein, 8 aa, Homo sapiens
VPLAIVNK

SEQ ID NO: 4997 - protein, 23 aa, Homo sapiens
VTDFGDKVEDPTFLNQLQSGVNR

SEQ ID NO: 4998 - protein, 19 aa, Homo sapiens
AVDDLNLHSYSNLPIWVNK

SEQ ID NO: 4999 - protein, 10 aa, Homo sapiens
VDDLLIIEEK

SEQ ID NO: 5000 - protein, 10 aa, Homo sapiens
SMANPPAAVK

SEQ ID NO: 5001 - protein, 13 aa, Homo sapiens
IKETVDQVEELRR

SEQ ID NO: 5002 - protein, 27 aa, Homo sapiens
QELEQHSVDTASTSDAVTFITYVQSLK

SEQ ID NO: 5003 - protein, 9 aa, Homo sapiens
ADLAAVEAK

SEQ ID NO: 5004 - protein, 10 aa, Homo sapiens
AATSPALFNR

SEQ ID NO: 5005 - protein, 19 aa, Homo sapiens
AHQANQLYPFAISLIESVR

SEQ ID NO: 5006 - protein, 16 aa, Homo sapiens
ALEHAFQLEHIMDLTR

SEQ ID NO: 5007 - protein, 8 aa, Homo sapiens
ALGEYLER

SEQ ID NO: 5008 - protein, 9 aa, Homo sapiens
ANEVEQMIR

SEQ ID NO: 5009 - protein, 14 aa, Homo sapiens
ASVVTLPVYLNFTR

SEQ ID NO: 5010 - protein, 14 aa, Homo sapiens
CLGSLFSMLHQACR

SEQ ID NO: 5011 - protein, 12 aa, Homo sapiens
CYLTMTQALEAR

SEQ ID NO: 5012 - protein, 12 aa, Homo sapiens
DHLYGTLDPNTR

SEQ ID NO: 5013 - protein, 9 aa, Homo sapiens
DIQMPDGIR

SEQ ID NO: 5014 - protein, 9 aa, Homo sapiens
DLFQVAFNR

SEQ ID NO: 5015 - protein, 19 aa, Homo sapiens
DPASGTALQEISFWLNLER

SEQ ID NO: 5016 - protein, 11 aa, Homo sapiens
DYIPVDQEELR

SEQ ID NO: 5017 - protein, 20 aa, Homo sapiens
EAIVNSCVFVHQTLHQANAR

SEQ ID NO: 5018 - protein, 17 aa, Homo sapiens
EALELTDTGLLSGSEER

SEQ ID NO: 5019 - protein, 20 aa, Homo sapiens
ENFIPTIVNFSAEEISDAIR

SEQ ID NO: 5020 - protein, 10 aa, Homo sapiens
EQPWVSVQPR

SEQ ID NO: 5021 - protein, 11 aa, Homo sapiens
ETVDQVEELRR

SEQ ID NO: 5022 - protein, 12 aa, Homo sapiens
EWTDGLFTHVLR

SEQ ID NO: 5023 - protein, 9 aa, Homo sapiens
EYQTQLIQR

SEQ ID NO: 5024 - protein, 23 aa, Homo sapiens
FGNPLLVQDVESYDPVLNPVLNR

SEQ ID NO: 5025 - protein, 14 aa, Homo sapiens
FLSDPQVHTVLVER

SEQ ID NO: 5026 - protein, 14 aa, Homo sapiens
FTQDTQPHYIYSPR

SEQ ID NO: 5027 - protein, 13 aa, Homo sapiens
GNEIVLSAGSTPR

SEQ ID NO: 5028 - protein, 17 aa, Homo sapiens
GTVGEPTYDAEFQHFLR

SEQ ID NO: 5029 - protein, 7 aa, Homo sapiens
HFPNIDR

SEQ ID NO: 5030 - protein, 9 aa, Homo sapiens
HLLPVETQR

SEQ ID NO: 5031 - protein, 24 aa, Homo sapiens
HVPVVYVDYPGPASLTQIYGTFNR

SEQ ID NO: 5032 - protein, 18 aa, Homo sapiens
IAFIMDESNVLDSGFLER

SEQ ID NO: 5033 - protein, 8 aa, Homo sapiens
IFTIESTR

SEQ ID NO: 5034 - protein, 15 aa, Homo sapiens
IQFVGACNPPTDPGR

SEQ ID NO: 5035 - protein, 14 aa, Homo sapiens
IQGLTVEQAEAVVR

SEQ ID NO: 5036 - protein, 17 aa, Homo sapiens
LCDEQLSSQSHYDFGLR

SEQ ID NO: 5037 - protein, 7 aa, Homo sapiens
LDMEIER

SEQ ID NO: 5038 - protein, 22 aa, Homo sapiens
LDRDPASGTALQEISFWLNLER

SEQ ID NO: 5039 - protein, 11 aa, Homo sapiens
LLLIQAFRPDR

SEQ ID NO: 5040 - protein, 8 aa, Homo sapiens
LLNTFLER

SEQ ID NO: 5041 - protein, 9 aa, Homo sapiens
LLTLPNGER

SEQ ID NO: 5042 - protein, 12 aa, Homo sapiens
LNTQEIFDDWAR

SEQ ID NO: 5043 - protein, 8 aa, Homo sapiens
LQGEFQLR

SEQ ID NO: 5044 - protein, 17 aa, Homo sapiens
LSLSNAISTALPLTQLR

SEQ ID NO: 5045 - protein, 7 aa, Homo sapiens
LVEAISR

SEQ ID NO: 5046 - protein, 8 aa, Homo sapiens
LVEDEERR

SEQ ID NO: 5047 - protein, 9 aa, Homo sapiens
LVQTPLTDR

SEQ ID NO: 5048 - protein, 17 aa, Homo sapiens
MLSAVSQQVQCIQEALR

SEQ ID NO: 5049 - protein, 8 aa, Homo sapiens
MVVLSLPR

SEQ ID NO: 5050 - protein, 7 aa, Homo sapiens
NANEMFR

SEQ ID NO: 5051 - protein, 7 aa, Homo sapiens
NLESALR

SEQ ID NO: 5052 - protein, 21 aa, Homo sapiens
NVAQYNANHPDFPMQIEQLER

SEQ ID NO: 5053 - protein, 15 aa, Homo sapiens
NYMSNPSYNYEIVNR

SEQ ID NO: 5054 - protein, 14 aa, Homo sapiens
QLIAQVMLYSQGFR

SEQ ID NO: 5055 - protein, 10 aa, Homo sapiens
QMVEHGGFYR

SEQ ID NO: 5056 - protein, 19 aa, Homo sapiens
QNLFTTWSHHLQQANIQFR

SEQ ID NO: 5057 - protein, 10 aa, Homo sapiens
QYASYEFVQR

SEQ ID NO: 5058 - protein, 9 aa, Homo sapiens
SFEWLSQMR

SEQ ID NO: 5059 - protein, 13 aa, Homo sapiens
SIPLDEGEDEAQR

SEQ ID NO: 5060 - protein, 15 aa, Homo sapiens
SPLVMDVLNIQGVQR

SEQ ID NO: 5061 - protein, 10 aa, Homo sapiens
TEYLSNADER

SEQ ID NO: 5062 - protein, 9 aa, Homo sapiens
TFDHYCEYR

SEQ ID NO: 5063 - protein, 8 aa, Homo sapiens
TFSEILNR

SEQ ID NO: 5064 - protein, 9 aa, Homo sapiens
TFSSIPVSR

SEQ ID NO: 5065 - protein, 11 aa, Homo sapiens
TLMAQSIYGGR

SEQ ID NO: 5066 - protein, 9 aa, Homo sapiens
TMTLFSALR

SEQ ID NO: 5067 - protein, 9 aa, Homo sapiens
TSFLDDAFR

SEQ ID NO: 5068 - protein, 20 aa, Homo sapiens
TYAEPLTAAMVEFYTMSQER

SEQ ID NO: 5069 - protein, 15 aa, Homo sapiens
VAAPDVVVPTLDTVR

SEQ ID NO: 5070 - protein, 8 aa, Homo sapiens
VDNEFDQR

SEQ ID NO: 5071 - protein, 7 aa, Homo sapiens
VPVNLLR

SEQ ID NO: 5072 - protein, 18 aa, Homo sapiens
VSPDMAIFITMNPGYAGR

SEQ ID NO: 5073 - protein, 8 aa, Homo sapiens
WFTSQVIR

SEQ ID NO: 5074 - protein, 9 aa, Homo sapiens
WQALLVQIR

SEQ ID NO: 5075 - protein, 9 aa, Homo sapiens
YATLATVSR

SEQ ID NO: 5076 - protein, 11 aa, Homo sapiens
YTGEDFDEDLR

SEQ ID NO: 5077 - protein, 12 aa, Homo sapiens
VKTSEDADELHK

SEQ ID NO: 5078 - protein, 17 aa, Homo sapiens
VAFGSLAANGPTTLVDK

SEQ ID NO: 5079 - protein, 10 aa, Homo sapiens
TSEDADELHK

SEQ ID NO: 5080 - protein, 18 aa, Homo sapiens
KTDPSSLGATSASFNFGK

SEQ ID NO: 5081 - protein, 15 aa, Homo sapiens
HVNTNPLCDLTPIFK

SEQ ID NO: 5082 - protein, 13 aa, Homo sapiens
LQQESTFLFHGNK

SEQ ID NO: 5083 - protein, 16 aa, Homo sapiens
NNVLIVCVPNPPIDEK

SEQ ID NO: 5084 - protein, 30 aa, Homo sapiens
KVDSSVLGSLSSVPLTGFSFSPGNSSLFGK

SEQ ID NO: 5085 - protein, 15 aa, Homo sapiens
VAAETQSPSLFGSTK

SEQ ID NO: 5086 - protein, 17 aa, Homo sapiens
TDPSSLGATSASFNFGK

SEQ ID NO: 5087 - protein, 13 aa, Homo sapiens
NVGFESDTGGAFK

SEQ ID NO: 5088 - protein, 10 aa, Homo sapiens
GLVVPSGGGR

SEQ ID NO: 5089 - protein, 11 aa, Homo sapiens
NATMPVTMLIR

SEQ ID NO: 5090 - protein, 14 aa, Homo sapiens
YLANIEQQHGNSGR

SEQ ID NO: 5091 - protein, 10 aa, Homo sapiens
ELDLNSVLLK

SEQ ID NO: 5092 - protein, 15 aa, Homo sapiens
HGTCAAQVDALNSQK

SEQ ID NO: 5093 - protein, 19 aa, Homo sapiens
LGVNNNQGVNIFNYQVATK

SEQ ID NO: 5094 - protein, 29 aa, Homo sapiens
HGLANLTAELLQQGANPNLQTEEALPLPK

SEQ ID NO: 5095 - protein, 13 aa, Homo sapiens
EDFSSMSAQLLYK

SEQ ID NO: 5096 - protein, 13 aa, Homo sapiens
RLESIATTLVSHK

SEQ ID NO: 5097 - protein, 19 aa, Homo sapiens
ANALHATNNLQIIPDFSLK

SEQ ID NO: 5098 - protein, 17 aa, Homo sapiens
ELDLSDANPEVTMTMLR

SEQ ID NO: 5099 - protein, 7 aa, Homo sapiens
FQLQLLR

SEQ ID NO: 5100 - protein, 9 aa, Homo sapiens
GVMSLVNVR

SEQ ID NO: 5101 - protein, 13 aa, Homo sapiens
NQLPLVVDAICTR

SEQ ID NO: 5102 - protein, 13 aa, Homo sapiens
TQDGETALQLAIR

SEQ ID NO: 5103 - protein, 12 aa, Homo sapiens
NQKPVPAVPVQK

SEQ ID NO: 5104 - protein, 13 aa, Homo sapiens
LSTQEGLVQELQK

SEQ ID NO: 5105 - protein, 18 aa, Homo sapiens
VPSLTTVPQTQGQTTAQK

SEQ ID NO: 5106 - protein, 11 aa, Homo sapiens
APSQLPLSGSR

SEQ ID NO: 5107 - protein, 7 aa, Homo sapiens
HDFSFDR

SEQ ID NO: 5108 - protein, 8 aa, Homo sapiens
LHGLEMER

SEQ ID NO: 5109 - protein, 19 aa, Homo sapiens
LQTSEAALSSSQAEVASLR

SEQ ID NO: 5110 - protein, 20 aa, Homo sapiens
TFTMEGGPGGDPQLEGLIPR

SEQ ID NO: 5111 - protein, 16 aa, Homo sapiens
TQTLDQENQQLQDQLR

SEQ ID NO: 5112 - protein, 31 aa, Homo sapiens
VRPVLPGEPTPPPGLLLFPSGPGGPSDPPTR

SEQ ID NO: 5113 - protein, 7 aa, Homo sapiens
DKVEIYK

SEQ ID NO: 5114 - protein, 11 aa, Homo sapiens
SFRPGDIVLAK

SEQ ID NO: 5115 - protein, 12 aa, Homo sapiens
VHILYVGSMPLK

SEQ ID NO: 5116 - protein, 17 aa, Homo sapiens
ETESQLLPDVGAIVTCK

SEQ ID NO: 5117 - protein, 14 aa, Homo sapiens
HGYIFSSLAGCLMK

SEQ ID NO: 5118 - protein, 16 aa, Homo sapiens
LCNLEEGSPGSGTYTR

SEQ ID NO: 5119 - protein, 14 aa, Homo sapiens
SSENGALPVVSVVR

SEQ ID NO: 5120 - protein, 10 aa, Homo sapiens
KIVDQIRPDR

SEQ ID NO: 5121 - protein, 10 aa, Homo sapiens
KKWDLSELPK

SEQ ID NO: 5122 - protein, 12 aa, Homo sapiens
DGWPAMCIHGDK

SEQ ID NO: 5123 - protein, 11 aa, Homo sapiens
QTLMWSATWPK

SEQ ID NO: 5124 - protein, 8 aa, Homo sapiens
GLDVEDVK

SEQ ID NO: 5125 - protein, 10 aa, Homo sapiens
STCIYGGAPK

SEQ ID NO: 5126 - protein, 8 aa, Homo sapiens
TIIFVETK

SEQ ID NO: 5127 - protein, 15 aa, Homo sapiens
LIQLMEEIMAEKENK

SEQ ID NO: 5128 - protein, 9 aa, Homo sapiens
LIDFLESGK

SEQ ID NO: 5129 - protein, 12 aa, Homo sapiens
DMVGIAQTGSGK

SEQ ID NO: 5130 - protein, 12 aa, Homo sapiens
VLEEANQAINPK

SEQ ID NO: 5131 - protein, 13 aa, Homo sapiens
GTAYTFFTPGNLK

SEQ ID NO: 5132 - protein, 9 aa, Homo sapiens
KWDLSELPK

SEQ ID NO: 5133 - protein, 12 aa, Homo sapiens
LIQLMEEIMAEK

SEQ ID NO: 5134 - protein, 15 aa, Homo sapiens
ELAQQVQQVADDYGK

SEQ ID NO: 5135 - protein, 12 aa, Homo sapiens
APILIATDVASR

SEQ ID NO: 5136 - protein, 13 aa, Homo sapiens
APLPDLYPFGTMR

SEQ ID NO: 5137 - protein, 11 aa, Homo sapiens
CTYLVLDEADR

SEQ ID NO: 5138 - protein, 8 aa, Homo sapiens
DWVLNEFR

SEQ ID NO: 5139 - protein, 33 aa, Homo sapiens
ESAAPAAAPTAEAPPPSVVTRPEPQALPSPAIR

SEQ ID NO: 5140 - protein, 17 aa, Homo sapiens
FVINYDYPNSSEDYVHR

SEQ ID NO: 5141 - protein, 13 aa, Homo sapiens
GDGPICLVLAPTR

SEQ ID NO: 5142 - protein, 11 aa, Homo sapiens
GVEICIATPGR

SEQ ID NO: 5143 - protein, 8 aa, Homo sapiens
LMQLVDHR

SEQ ID NO: 5144 - protein, 10 aa, Homo sapiens
LTPYEVDELR

SEQ ID NO: 5145 - protein, 11 aa, Homo sapiens
LTPYEVDELRR

SEQ ID NO: 5146 - protein, 11 aa, Homo sapiens
NFYVEHPEVAR

SEQ ID NO: 5147 - protein, 8 aa, Homo sapiens
QLAEDFLR

SEQ ID NO: 5148 - protein, 14 aa, Homo sapiens
SSQSSSQQFSGIGR

SEQ ID NO: 5149 - protein, 20 aa, Homo sapiens
TLAYLLPAIVHINHQPYLER

SEQ ID NO: 5150 - protein, 18 aa, Homo sapiens
TTSSANNPNLMYQDECDR

SEQ ID NO: 5151 - protein, 19 aa, Homo sapiens
TTSSANNPNLMYQDECDRR

SEQ ID NO: 5152 - protein, 15 aa, Homo sapiens
GEQSAGENSLEDLTK

SEQ ID NO: 5153 - protein, 20 aa, Homo sapiens
SKPTVDIVNQAGETALDIAK

SEQ ID NO: 5154 - protein, 14 aa, Homo sapiens
NTVTLLEEALDQDR

SEQ ID NO: 5155 - protein, 13 aa, Homo sapiens
SHPLDLSPNVQSR

SEQ ID NO: 5156 - protein, 18 aa, Homo sapiens
LAVTSYTDIADLMDAGNK

SEQ ID NO: 5157 - protein, 11 aa, Homo sapiens
EANAISVELKK

SEQ ID NO: 5158 - protein, 8 aa, Homo sapiens
FNHPEQAR

SEQ ID NO: 5159 - protein, 22 aa, Homo sapiens
TAMVAALSPADINYDETLSTLR

SEQ ID NO: 5160 - protein, 9 aa, Homo sapiens
VLYAPWLLK

SEQ ID NO: 5161 - protein, 14 aa, Homo sapiens
LAWAPLVDAQGSAR

SEQ ID NO: 5162 - protein, 22 aa, Homo sapiens
VLSVDESIIKPEQEFFTAPFEK

SEQ ID NO: 5163 - protein, 14 aa, Homo sapiens
LGLIEWLENTVTLK

SEQ ID NO: 5164 - protein, 11 aa, Homo sapiens
CKIPALDLLIK

SEQ ID NO: 5165 - protein, 7 aa, Homo sapiens
FIQTFGK

SEQ ID NO: 5166 - protein, 15 aa, Homo sapiens
ECSPWMSDFKVEFLR

SEQ ID NO: 5167 - protein, 19 aa, Homo sapiens
AVAFFLESIAMHDIIAAEK

SEQ ID NO: 5168 - protein, 10 aa, Homo sapiens
KDLCNTHLMR

SEQ ID NO: 5169 - protein, 19 aa, Homo sapiens
LQSVQALTEIQEFISFISK

SEQ ID NO: 5170 - protein, 14 aa, Homo sapiens
KGGSWIQEINVAEK

SEQ ID NO: 5171 - protein, 11 aa, Homo sapiens
FMNAVFFLLPK

SEQ ID NO: 5172 - protein, 13 aa, Homo sapiens
LGLPGDEVDNKVK

SEQ ID NO: 5173 - protein, 11 aa, Homo sapiens
HDVGAYMLMYK

SEQ ID NO: 5174 - protein, 12 aa, Homo sapiens
RLGLPGDEVDNK

SEQ ID NO: 5175 - protein, 9 aa, Homo sapiens
MAVLALLAK

SEQ ID NO: 5176 - protein, 8 aa, Homo sapiens
EIFNFVLK

SEQ ID NO: 5177 - protein, 10 aa, Homo sapiens
ECSPWMSDFK

SEQ ID NO: 5178 - protein, 10 aa, Homo sapiens
ICSKPVVLPK

SEQ ID NO: 5179 - protein, 10 aa, Homo sapiens
QFINLMLPMK

SEQ ID NO: 5180 - protein, 7 aa, Homo sapiens
WKVPTYK

SEQ ID NO: 5181 - protein, 7 aa, Homo sapiens
DLPSWMK

SEQ ID NO: 5182 - protein, 7 aa, Homo sapiens
TLVECWK

SEQ ID NO: 5183 - protein, 14 aa, Homo sapiens
KNILEESLCELVAK

SEQ ID NO: 5184 - protein, 7 aa, Homo sapiens
AFLGELK

SEQ ID NO: 5185 - protein, 9 aa, Homo sapiens
SKDFVQVMR

SEQ ID NO: 5186 - protein, 12 aa, Homo sapiens
DLLLNTMSQEEK

SEQ ID NO: 5187 - protein, 7 aa, Homo sapiens
CDSWWAK

SEQ ID NO: 5188 - protein, 8 aa, Homo sapiens
VFLALAAK

SEQ ID NO: 5189 - protein, 8 aa, Homo sapiens
SVGPDFGK

SEQ ID NO: 5190 - protein, 13 aa, Homo sapiens
NILEESLCELVAK

SEQ ID NO: 5191 - protein, 12 aa, Homo sapiens
VEGMTELYFQLK

SEQ ID NO: 5192 - protein, 14 aa, Homo sapiens
VVQMLGSLGGQINK

SEQ ID NO: 5193 - protein, 22 aa, Homo sapiens
IIANALSSEPACLAEIEEDKAR

SEQ ID NO: 5194 - protein, 7 aa, Homo sapiens
SPNLWLK

SEQ ID NO: 5195 - protein, 9 aa, Homo sapiens
YSCFALFVK

SEQ ID NO: 5196 - protein, 14 aa, Homo sapiens
ILELSGSSSEDSEK

SEQ ID NO: 5197 - protein, 9 aa, Homo sapiens
KIPDTVLEK

SEQ ID NO: 5198 - protein, 8 aa, Homo sapiens
IPDTVLEK

SEQ ID NO: 5199 - protein, 11 aa, Homo sapiens
GLSSLLCNFTK

SEQ ID NO: 5200 - protein, 12 aa, Homo sapiens
QLFSSLFSGILK

SEQ ID NO: 5201 - protein, 15 aa, Homo sapiens
DPESETDNDSQEIFK

SEQ ID NO: 5202 - protein, 9 aa, Homo sapiens
IPALDLLIK

SEQ ID NO: 5203 - protein, 11 aa, Homo sapiens
QCLPSLDLSCK

SEQ ID NO: 5204 - protein, 17 aa, Homo sapiens
IMEFTTTLLNTSPEGWK

SEQ ID NO: 5205 - protein, 18 aa, Homo sapiens
INQVFHGSCITEGNELTK

SEQ ID NO: 5206 - protein, 19 aa, Homo sapiens
ATQMPEGGQGAPPMYQLYK

SEQ ID NO: 5207 - protein, 8 aa, Homo sapiens
YFEGVSPK

SEQ ID NO: 5208 - protein, 12 aa, Homo sapiens
HECMAPLTALVK

SEQ ID NO: 5209 - protein, 8 aa, Homo sapiens
QYDEALNK

SEQ ID NO: 5210 - protein, 9 aa, Homo sapiens
FNNYVDCMK

SEQ ID NO: 5211 - protein, 9 aa, Homo sapiens
MYAALGDPK

SEQ ID NO: 5212 - protein, 8 aa, Homo sapiens
VCLDIIYK

SEQ ID NO: 5213 - protein, 10 aa, Homo sapiens
GIFTSEIGTK

SEQ ID NO: 5214 - protein, 9 aa, Homo sapiens
AIRPQIDLK

SEQ ID NO: 5215 - protein, 10 aa, Homo sapiens
LATTILQHWK

SEQ ID NO: 5216 - protein, 12 aa, Homo sapiens
APPCEYKDWLTK

SEQ ID NO: 5217 - protein, 10 aa, Homo sapiens
KQNNFSLAMK

SEQ ID NO: 5218 - protein, 11 aa, Homo sapiens
LLALNSLYSPK

SEQ ID NO: 5219 - protein, 20 aa, Homo sapiens
IIANALSSEPACLAEIEEDK

SEQ ID NO: 5220 - protein, 8 aa, Homo sapiens
FYGELALK

SEQ ID NO: 5221 - protein, 14 aa, Homo sapiens
LSDFNDITNMLLLK

SEQ ID NO: 5222 - protein, 7 aa, Homo sapiens
SIELFYK

SEQ ID NO: 5223 - protein, 12 aa, Homo sapiens
NLLIFENLIDLK

SEQ ID NO: 5224 - protein, 7 aa, Homo sapiens
IGELFSK

SEQ ID NO: 5225 - protein, 14 aa, Homo sapiens
LVINTEEVFRPYAK

SEQ ID NO: 5226 - protein, 18 aa, Homo sapiens
NLDLAVLELMQSSVDNTK

SEQ ID NO: 5227 - protein, 20 aa, Homo sapiens
SLEYCSTASIDSENPPDLNK

SEQ ID NO: 5228 - protein, 11 aa, Homo sapiens
AALSALESFLK

SEQ ID NO: 5229 - protein, 10 aa, Homo sapiens
LLPAELPAKR

SEQ ID NO: 5230 - protein, 24 aa, Homo sapiens
KEEENASVIDSAELQAYPALVVEK

SEQ ID NO: 5231 - protein, 9 aa, Homo sapiens
LAAVVSACK

SEQ ID NO: 5232 - protein, 9 aa, Homo sapiens
LPLISGFYK

SEQ ID NO: 5233 - protein, 12 aa, Homo sapiens
LYSLALHPNAFK

SEQ ID NO: 5234 - protein, 17 aa, Homo sapiens
LLLQGEADQSLLTFIDK

SEQ ID NO: 5235 - protein, 13 aa, Homo sapiens
FYQGFLFSEKPEK

SEQ ID NO: 5236 - protein, 15 aa, Homo sapiens
AQEPESGLSEETQVK

SEQ ID NO: 5237 - protein, 12 aa, Homo sapiens
LNESTFDTQITK

SEQ ID NO: 5238 - protein, 8 aa, Homo sapiens
HVMQPYYK

SEQ ID NO: 5239 - protein, 15 aa, Homo sapiens
SDPGLLTNTMDVFVK

SEQ ID NO: 5240 - protein, 9 aa, Homo sapiens
IAPYSVEIK

SEQ ID NO: 5241 - protein, 12 aa, Homo sapiens
QGNLSSQVPLKR

SEQ ID NO: 5242 - protein, 13 aa, Homo sapiens
NLLTVTSSDEMMK

SEQ ID NO: 5243 - protein, 8 aa, Homo sapiens
KFIQTFGK

SEQ ID NO: 5244 - protein, 13 aa, Homo sapiens
SQGCSEQVLTVLK

SEQ ID NO: 5245 - protein, 20 aa, Homo sapiens
LAGANPAVITCDELLLGHEK

SEQ ID NO: 5246 - protein, 11 aa, Homo sapiens
MKQDAQVVLYR

SEQ ID NO: 5247 - protein, 11 aa, Homo sapiens
DILPCLDGYLK

SEQ ID NO: 5248 - protein, 15 aa, Homo sapiens
GFPPSASLCLLDLVK

SEQ ID NO: 5249 - protein, 11 aa, Homo sapiens
LGLPGDEVDNK

SEQ ID NO: 5250 - protein, 7 aa, Homo sapiens
EHPFLVK

SEQ ID NO: 5251 - protein, 7 aa, Homo sapiens
HNLEIIK

SEQ ID NO: 5252 - protein, 9 aa, Homo sapiens
LPVLAGCLK

SEQ ID NO: 5253 - protein, 7 aa, Homo sapiens
LLNFLMK

SEQ ID NO: 5254 - protein, 7 aa, Homo sapiens
FIVCLNK

SEQ ID NO: 5255 - protein, 18 aa, Homo sapiens
TVGALQVLGTEAQSSLLK

SEQ ID NO: 5256 - protein, 30 aa, Homo sapiens
SSFDWLTGSSTDPLVDHTSPSSDSLLFAHK

SEQ ID NO: 5257 - protein, 12 aa, Homo sapiens
GHDEREHPFLVK

SEQ ID NO: 5258 - protein, 10 aa, Homo sapiens
GKPLPEYHVR

SEQ ID NO: 5259 - protein, 7 aa, Homo sapiens
DSPLETK

SEQ ID NO: 5260 - protein, 11 aa, Homo sapiens
AYVPALQMAFK

SEQ ID NO: 5261 - protein, 16 aa, Homo sapiens
TVSLLDENNVSSYLSK

SEQ ID NO: 5262 - protein, 11 aa, Homo sapiens
YPEETLSLMTK

SEQ ID NO: 5263 - protein, 9 aa, Homo sapiens
QITPQQQEK

SEQ ID NO: 5264 - protein, 10 aa, Homo sapiens
HGDLPDIQIK

SEQ ID NO: 5265 - protein, 8 aa, Homo sapiens
FLCIFLEK

SEQ ID NO: 5266 - protein, 10 aa, Homo sapiens
GYGLFAGPCK

SEQ ID NO: 5267 - protein, 13 aa, Homo sapiens
MSPYKDILETHLR

SEQ ID NO: 5268 - protein, 15 aa, Homo sapiens
RILELSGSSSEDSEK

SEQ ID NO: 5269 - protein, 8 aa, Homo sapiens
AAYLSDPR

SEQ ID NO: 5270 - protein, 8 aa, Homo sapiens
APGLGAFR

SEQ ID NO: 5271 - protein, 10 aa, Homo sapiens
CFGTGAAGNR

SEQ ID NO: 5272 - protein, 12 aa, Homo sapiens
CGAALAGHQLIR

SEQ ID NO: 5273 - protein, 14 aa, Homo sapiens
CLMDQATDPNILGR

SEQ ID NO: 5274 - protein, 8 aa, Homo sapiens
DCLSIPYR

SEQ ID NO: 5275 - protein, 13 aa, Homo sapiens
DDWLVSWVQSYCR

SEQ ID NO: 5276 - protein, 7 aa, Homo sapiens
DEVLANR

SEQ ID NO: 5277 - protein, 7 aa, Homo sapiens
DFVQVMR

SEQ ID NO: 5278 - protein, 8 aa, Homo sapiens
DILETHLR

SEQ ID NO: 5279 - protein, 9 aa, Homo sapiens
DLCNTHLMR

SEQ ID NO: 5280 - protein, 18 aa, Homo sapiens
DPTVHDDVLELEMDELNR

SEQ ID NO: 5281 - protein, 11 aa, Homo sapiens
DQNILLGTTYR

SEQ ID NO: 5282 - protein, 12 aa, Homo sapiens
DVDFMYVELIQR

SEQ ID NO: 5283 - protein, 19 aa, Homo sapiens
DVLIQGLIDENPGLQLIIR

SEQ ID NO: 5284 - protein, 7 aa, Homo sapiens
DWSNDVR

SEQ ID NO: 5285 - protein, 7 aa, Homo sapiens
DYVDLFR

SEQ ID NO: 5286 - protein, 8 aa, Homo sapiens
EFPPGTPR

SEQ ID NO: 5287 - protein, 18 aa, Homo sapiens
ELLNPVVEFVSHPSTTCR

SEQ ID NO: 5288 - protein, 15 aa, Homo sapiens
EQQHVMEELFQSSFR

SEQ ID NO: 5289 - protein, 14 aa, Homo sapiens
ETGLMYSIMVHALR

SEQ ID NO: 5290 - protein, 15 aa, Homo sapiens
EVYAAAAEVLGLILR

SEQ ID NO: 5291 - protein, 9 aa, Homo sapiens
FVPLLPGNR

SEQ ID NO: 5292 - protein, 13 aa, Homo sapiens
GGSWIQEINVAEK

SEQ ID NO: 5293 - protein, 8 aa, Homo sapiens
GIAPGDER

SEQ ID NO: 5294 - protein, 25 aa, Homo sapiens
GLGQECVLSSSPAVLALQTSLVFSR

SEQ ID NO: 5295 - protein, 22 aa, Homo sapiens
GQAVTLLPFFTSLTGGSLEELR

SEQ ID NO: 5296 - protein, 23 aa, Homo sapiens
GQAVTLLPFFTSLTGGSLEELRR

SEQ ID NO: 5297 - protein, 18 aa, Homo sapiens
GSCVTQVGLLESVYEMFR

SEQ ID NO: 5298 - protein, 14 aa, Homo sapiens
HSSLITPLQAVAQR

SEQ ID NO: 5299 - protein, 8 aa, Homo sapiens
ILDVMYSR

SEQ ID NO: 5300 - protein, 23 aa, Homo sapiens
ITAQSIEELCAVNLYGPDAQVDR

SEQ ID NO: 5301 - protein, 17 aa, Homo sapiens
IWSEPFYQETYLPYMIR

SEQ ID NO: 5302 - protein, 10 aa, Homo sapiens
LACDVDQVTR

SEQ ID NO: 5303 - protein, 19 aa, Homo sapiens
LCYDAFTENMAGENQLLER

SEQ ID NO: 5304 - protein, 12 aa, Homo sapiens
LGASLAFNNIYR

SEQ ID NO: 5305 - protein, 11 aa, Homo sapiens
LGNPIVPLNIR

SEQ ID NO: 5306 - protein, 8 aa, Homo sapiens
LLEEALLR

SEQ ID NO: 5307 - protein, 8 aa, Homo sapiens
LLNTWTNR

SEQ ID NO: 5308 - protein, 7 aa, Homo sapiens
LLQDFNR

SEQ ID NO: 5309 - protein, 7 aa, Homo sapiens
LLQIIER

SEQ ID NO: 5310 - protein, 7 aa, Homo sapiens
LLSITVR

SEQ ID NO: 5311 - protein, 7 aa, Homo sapiens
LPPDVLR

SEQ ID NO: 5312 - protein, 8 aa, Homo sapiens
LPSNTLDR

SEQ ID NO: 5313 - protein, 10 aa, Homo sapiens
LQETLSAADR

SEQ ID NO: 5314 - protein, 13 aa, Homo sapiens
LQYFMEQFYGIIR

SEQ ID NO: 5315 - protein, 8 aa, Homo sapiens
LSFAVPFR

SEQ ID NO: 5316 - protein, 7 aa, Homo sapiens
LSLMYAR

SEQ ID NO: 5317 - protein, 21 aa, Homo sapiens
LTPLPEDNSMNVDQDGDPSDR

SEQ ID NO: 5318 - protein, 14 aa, Homo sapiens
MDPMNIWDDIITNR

SEQ ID NO: 5319 - protein, 15 aa, Homo sapiens
MEVQEQEEDISSLIR

SEQ ID NO: 5320 - protein, 7 aa, Homo sapiens
MQLVCCR

SEQ ID NO: 5321 - protein, 12 aa, Homo sapiens
MSTSPEAFLALR

SEQ ID NO: 5322 - protein, 13 aa, Homo sapiens
NCISTVVHQGLIR

SEQ ID NO: 5323 - protein, 12 aa, Homo sapiens
NELEIPGQYDGR

SEQ ID NO: 5324 - protein, 8 aa, Homo sapiens
NFWSHETR

SEQ ID NO: 5325 - protein, 14 aa, Homo sapiens
NLSSNEAISLEEIR

SEQ ID NO: 5326 - protein, 10 aa, Homo sapiens
NNWEVSALSR

SEQ ID NO: 5327 - protein, 9 aa, Homo sapiens
QDAQVVLYR

SEQ ID NO: 5328 - protein, 12 aa, Homo sapiens
QITQSALLAEAR

SEQ ID NO: 5329 - protein, 19 aa, Homo sapiens
QLASGLLELAFAFGGLCER

SEQ ID NO: 5330 - protein, 13 aa, Homo sapiens
QMFLTQTDTGDDR

SEQ ID NO: 5331 - protein, 19 aa, Homo sapiens
RGSCVTQVGLLESVYEMFR

SEQ ID NO: 5332 - protein, 14 aa, Homo sapiens
RYNFPVEVEVPMER

SEQ ID NO: 5333 - protein, 9 aa, Homo sapiens
SIGEYDVLR

SEQ ID NO: 5334 - protein, 14 aa, Homo sapiens
SLGPPQGEEDSVPR

SEQ ID NO: 5335 - protein, 17 aa, Homo sapiens
SLGTIQQCCDAIDHLCR

SEQ ID NO: 5336 - protein, 8 aa, Homo sapiens
SLNSIEFR

SEQ ID NO: 5337 - protein, 10 aa, Homo sapiens
SMEEDPQTSR

SEQ ID NO: 5338 - protein, 21 aa, Homo sapiens
STVLTPMFVETQASQGTLQTR

SEQ ID NO: 5339 - protein, 8 aa, Homo sapiens
TETVTSFR

SEQ ID NO: 5340 - protein, 7 aa, Homo sapiens
TFPVLLR

SEQ ID NO: 5341 - protein, 9 aa, Homo sapiens
TQEGSLSAR

SEQ ID NO: 5342 - protein, 15 aa, Homo sapiens
TRDDWLVSWVQSYCR

SEQ ID NO: 5343 - protein, 9 aa, Homo sapiens
TWEGWEPWM

SEQ ID NO: 5344 - protein, 10 aa, Homo sapiens
TYSVVPMTSR

SEQ ID NO: 5345 - protein, 21 aa, Homo sapiens
VEQLFQVMNGILAQDSACSQR

SEQ ID NO: 5346 - protein, 8 aa, Homo sapiens
VIAGLYQR

SEQ ID NO: 5347 - protein, 15 aa, Homo sapiens
VLEQLIVAHFPMQSR

SEQ ID NO: 5348 - protein, 11 aa, Homo sapiens
VTELALTASDR

SEQ ID NO: 5349 - protein, 8 aa, Homo sapiens
VTVMASLR

SEQ ID NO: 5350 - protein, 8 aa, Homo sapiens
WLLAHCGR

SEQ ID NO: 5351 - protein, 8 aa, Homo sapiens
WPVAGQIR

SEQ ID NO: 5352 - protein, 9 aa, Homo sapiens
YAVPSAGLR

SEQ ID NO: 5353 - protein, 13 aa, Homo sapiens
YNFPVEVEVPMER

SEQ ID NO: 5354 - protein, 8 aa, Homo sapiens
VCMYFTYK

SEQ ID NO: 5355 - protein, 14 aa, Homo sapiens
TYGGCEGPDAMYVK

SEQ ID NO: 5356 - protein, 10 aa, Homo sapiens
EHALTSGTIK

SEQ ID NO: 5357 - protein, 9 aa, Homo sapiens
EIPSHVLSK

SEQ ID NO: 5358 - protein, 13 aa, Homo sapiens
LISSDGHEFIVKR

SEQ ID NO: 5359 - protein, 12 aa, Homo sapiens
LISSDGHEFIVK

SEQ ID NO: 5360 - protein, 20 aa, Homo sapiens
AMLSGPGQFAENETNEVNFR

SEQ ID NO: 5361 - protein, 10 aa, Homo sapiens
DALLLIFANK

SEQ ID NO: 5362 - protein, 14 aa, Homo sapiens
EAVGHTGYLTFATK

SEQ ID NO: 5363 - protein, 10 aa, Homo sapiens
SFVAYEELIK

SEQ ID NO: 5364 - protein, 13 aa, Homo sapiens
HSVDLIGRPFGSK

SEQ ID NO: 5365 - protein, 9 aa, Homo sapiens
AREEFQEHR

SEQ ID NO: 5366 - protein, 18 aa, Homo sapiens
EGDTAILSLGHGAMVAVR

SEQ ID NO: 5367 - protein, 17 aa, Homo sapiens
TIAPTGHLHTVEFHQQR

SEQ ID NO: 5368 - protein, 16 aa, Homo sapiens
KFDPMGQQTCSAHPAR

SEQ ID NO: 5369 - protein, 15 aa, Homo sapiens
FDPMGQQTCSAHPAR

SEQ ID NO: 5370 - protein, 13 aa, Homo sapiens
MFLQYYLNEQGDR

SEQ ID NO: 5371 - protein, 8 aa, Homo sapiens
VLMTQQPR

SEQ ID NO: 5372 - protein, 11 aa, Homo sapiens
VLMTQQPRPVL

SEQ ID NO: 5373 - protein, 9 aa, Homo sapiens
DINELNLPK

SEQ ID NO: 5374 - protein, 11 aa, Homo sapiens
LVICPDEGFYK

SEQ ID NO: 5375 - protein, 11 aa, Homo sapiens
VGQGYPHDPPK

SEQ ID NO: 5376 - protein, 16 aa, Homo sapiens
TCDISFSDPDDLLNFK

SEQ ID NO: 5377 - protein, 7 aa, Homo sapiens
ASAAQLR

SEQ ID NO: 5378 - protein, 10 aa, Homo sapiens
EAAEVLQNNR

SEQ ID NO: 5379 - protein, 11 aa, Homo sapiens
EAAEVLQNNRR

SEQ ID NO: 5380 - protein, 11 aa, Homo sapiens
GGYIGSTYFER

SEQ ID NO: 5381 - protein, 9 aa, Homo sapiens
RLFEQNVQR

SEQ ID NO: 5382 - protein, 18 aa, Homo sapiens
SVSAFAPICNPVLCPWGK

SEQ ID NO: 5383 - protein, 12 aa, Homo sapiens
AFSGYLGTDQSK

SEQ ID NO: 5384 - protein, 23 aa, Homo sapiens
MYSYVTEELPQLINANFPVDPQR

SEQ ID NO: 5385 - protein, 15 aa, Homo sapiens
GSLPSGTTIEWLEPK

SEQ ID NO: 5386 - protein, 13 aa, Homo sapiens
SILTVPWVELGGK

SEQ ID NO: 5387 - protein, 10 aa, Homo sapiens
VVLPTFILEK

SEQ ID NO: 5388 - protein, 22 aa, Homo sapiens
FVAEQVSHHPPVSGFYAECTER

SEQ ID NO: 5389 - protein, 15 aa, Homo sapiens
NSSCGGGISSSSSSR

SEQ ID NO: 5390 - protein, 15 aa, Homo sapiens
SFSLASSSNSPISQR

SEQ ID NO: 5391 - protein, 8 aa, Homo sapiens
DKVVVFLK

SEQ ID NO: 5392 - protein, 14 aa, Homo sapiens
DYAAYNVLDDPELR

SEQ ID NO: 5393 - protein, 19 aa, Homo sapiens
GTPEQPQCGFSNAVVQILR

SEQ ID NO: 5394 - protein, 26 aa, Homo sapiens
KHISQISVAEDDDESLLGHLMIVGKK

SEQ ID NO: 5395 - protein, 25 aa, Homo sapiens
HISQISVAEDDDESLLGHLMIVGKK

SEQ ID NO: 5396 - protein, 10 aa, Homo sapiens
KCAADLGLNK

SEQ ID NO: 5397 - protein, 9 aa, Homo sapiens
CAADLGLNK

SEQ ID NO: 5398 - protein, 25 aa, Homo sapiens
KHISQISVAEDDDESLLGHLMIVGK

SEQ ID NO: 5399 - protein, 14 aa, Homo sapiens
AQVARPGGDTIFGK

SEQ ID NO: 5400 - protein, 9 aa, Homo sapiens
PGGDTIFGK

SEQ ID NO: 5401 - protein, 20 aa, Homo sapiens
CLAFHDISPQAPTHFLVIPK

SEQ ID NO: 5402 - protein, 24 aa, Homo sapiens
HISQISVAEDDDESLLGHLMIVGK

SEQ ID NO: 5403 - protein, 7 aa, Homo sapiens
IIFEDDR

SEQ ID NO: 5404 - protein, 24 aa, Homo sapiens
MVVNEGSDGGQSVYHVHLHVLGGR

SEQ ID NO: 5405 - protein, 11 aa, Homo sapiens
DVKPSNVLINK

SEQ ID NO: 5406 - protein, 14 aa, Homo sapiens
FPYESWGTPFQQLK

SEQ ID NO: 5407 - protein, 16 aa, Homo sapiens
MCDFGISGYLVDSVAK

SEQ ID NO: 5408 - protein, 16 aa, Homo sapiens
MSYLELMEHPFFTLHK

SEQ ID NO: 5409 - protein, 11 aa, Homo sapiens
HAQSGTIMAVK

SEQ ID NO: 5410 - protein, 14 aa, Homo sapiens
FSPEFVDFTAQCLR

SEQ ID NO: 5411 - protein, 8 aa, Homo sapiens
TFITIGDR

SEQ ID NO: 5412 - protein, 17 aa, Homo sapiens
LEICNLTPDTLTSDTYK

SEQ ID NO: 5413 - protein, 18 aa, Homo sapiens
LEICNLTPDTLTSDTYKK

SEQ ID NO: 5414 - protein, 15 aa, Homo sapiens
NYPNTFWMNPQYLIK

SEQ ID NO: 5415 - protein, 23 aa, Homo sapiens
GSLLGCSIDITSAADSEAITFQK

SEQ ID NO: 5416 - protein, 13 aa, Homo sapiens
IMVDMLDSDGSGK

SEQ ID NO: 5417 - protein, 24 aa, Homo sapiens
LPPGEYILVPSTFEPNKDGDFCIR

SEQ ID NO: 5418 - protein, 10 aa, Homo sapiens
SDGFSIETCK

SEQ ID NO: 5419 - protein, 24 aa, Homo sapiens
LEEEDEDEEDGESGCTFLVGLIQK

SEQ ID NO: 5420 - protein, 31 aa, Homo sapiens
KADYQAVDDEIEANLEEFDISEDDIDDGFRR

SEQ ID NO: 5421 - protein, 8 aa, Homo sapiens
ALEEAGFK

SEQ ID NO: 5422 - protein, 26 aa, Homo sapiens
FKLPPGEYILVPSTFEPNKDGDFCIR

SEQ ID NO: 5423 - protein, 30 aa, Homo sapiens
KMGEDMHTIGFGIYEVPEELSGQTNIHLSK

SEQ ID NO: 5424 - protein, 10 aa, Homo sapiens
ERSDTFINLR

SEQ ID NO: 5425 - protein, 15 aa, Homo sapiens
FADDQLIIDFDNFVR

SEQ ID NO: 5426 - protein, 12 aa, Homo sapiens
MPCQLHQVIVAR

SEQ ID NO: 5427 - protein, 7 aa, Homo sapiens
NFFLTNR

SEQ ID NO: 5428 - protein, 11 aa, Homo sapiens
NPWGEVEWTGR

SEQ ID NO: 5429 - protein, 18 aa, Homo sapiens
RPTEICADPQFIIGGATR

SEQ ID NO: 5430 - protein, 8 aa, Homo sapiens
SDTFINLR

SEQ ID NO: 5431 - protein, 10 aa, Homo sapiens
SGTMNSYEMR

SEQ ID NO: 5432 - protein, 16 aa, Homo sapiens
WNDNCPSWNTIDPEER

SEQ ID NO: 5433 - protein, 19 aa, Homo sapiens
LTGIKHELQANCYEEVKDR

SEQ ID NO: 5434 - protein, 9 aa, Homo sapiens
KNIILEEGK

SEQ ID NO: 5435 - protein, 20 aa, Homo sapiens
ESKKEDLVFIFWAPESAPLK

SEQ ID NO: 5436 - protein, 20 aa, Homo sapiens
ASGVAVSDGVIKVFNDMKVR

SEQ ID NO: 5437 - protein, 29 aa, Homo sapiens
KNIILEEGKEILVGDVGQTVDDPYATFVK

SEQ ID NO: 5438 - protein, 17 aa, Homo sapiens
KEDLVFIFWAPESAPLK

SEQ ID NO: 5439 - protein, 12 aa, Homo sapiens
KAVLFCLSEDKK

SEQ ID NO: 5440 - protein, 17 aa, Homo sapiens
LTGIKHELQANCYEEVK

SEQ ID NO: 5441 - protein, 14 aa, Homo sapiens
LGGSAVISLEGKPL

SEQ ID NO: 5442 - protein, 14 aa, Homo sapiens
HELQANCYEEVKDR

SEQ ID NO: 5443 - protein, 11 aa, Homo sapiens
AVLFCLSEDKK

SEQ ID NO: 5444 - protein, 10 aa, Homo sapiens
AVLFCLSEDK

SEQ ID NO: 5445 - protein, 12 aa, Homo sapiens
HELQANCYEEVK

SEQ ID NO: 5446 - protein, 11 aa, Homo sapiens
YALYDATYETK

SEQ ID NO: 5447 - protein, 8 aa, Homo sapiens
NIILEEGK

SEQ ID NO: 5448 - protein, 8 aa, Homo sapiens
MLPDKDCR

SEQ ID NO: 5449 - protein, 18 aa, Homo sapiens
ASGVAVSDGVIKVFNDMK

SEQ ID NO: 5450 - protein, 20 aa, Homo sapiens
EILVGDVGQTVDDPYATFVK

SEQ ID NO: 5451 - protein, 28 aa, Homo sapiens
NIILEEGKEILVGDVGQTVDDPYATFVK

SEQ ID NO: 5452 - protein, 12 aa, Homo sapiens
ASGVAVSDGVIK

SEQ ID NO: 5453 - protein, 12 aa, Homo sapiens
LGGSAVISLEGK

SEQ ID NO: 5454 - protein, 24 aa, Homo sapiens
KAEGDLGPSWVCGFSNLESQVLEK

SEQ ID NO: 5455 - protein, 21 aa, Homo sapiens
VDAAPGIPPAVESIQDSPLPK

SEQ ID NO: 5456 - protein, 9 aa, Homo sapiens
AAVEELLER

SEQ ID NO: 5457 - protein, 15 aa, Homo sapiens
DMASPNWSILPEEER

SEQ ID NO: 5458 - protein, 9 aa, Homo sapiens
LYGNPNTLR

SEQ ID NO: 5459 - protein, 14 aa, Homo sapiens
NNWNDVDDFNWLAR

SEQ ID NO: 5460 - protein, 11 aa, Homo sapiens
FSYMAIIEGAK

SEQ ID NO: 5461 - protein, 9 aa, Homo sapiens
EFEELDTQR

SEQ ID NO: 5462 - protein, 21 aa, Homo sapiens
LQNAENDYINASLVDIEEAQR

SEQ ID NO: 5463 - protein, 19 aa, Homo sapiens
SYYTVHLLQLENINSGETR

SEQ ID NO: 5464 - protein, 14 aa, Homo sapiens
SLDPADERDDVLAK

SEQ ID NO: 5465 - protein, 11 aa, Homo sapiens
ALQQEQEIEQR

SEQ ID NO: 5466 - protein, 16 aa, Homo sapiens
LPSRPGAQGVEPQNLR

SEQ ID NO: 5467 - protein, 9 aa, Homo sapiens
TLQGHSVIR

SEQ ID NO: 5468 - protein, 10 aa, Homo sapiens
VEPFVCAQCR

SEQ ID NO: 5469 - protein, 13 aa, Homo sapiens
VIAPNPAQLQGQR

SEQ ID NO: 5470 - protein, 9 aa, Homo sapiens
TFTNVYWMK

SEQ ID NO: 5471 - protein, 10 aa, Homo sapiens
AQLGGPELQR

SEQ ID NO: 5472 - protein, 13 aa, Homo sapiens
CVGLSAPQLGVPR

SEQ ID NO: 5473 - protein, 8 aa, Homo sapiens
GVAAPVER

SEQ ID NO: 5474 - protein, 22 aa, Homo sapiens
LVLGPPEPPFSHVCQVGDPVLR

SEQ ID NO: 5475 - protein, 8 aa, Homo sapiens
VFVNPSLR

SEQ ID NO: 5476 - protein, 18 aa, Homo sapiens
LGPVDMLVNCAGMAVSGK

SEQ ID NO: 5477 - protein, 20 aa, Homo sapiens
PLALPGAHVVVTGGSSGIGK

SEQ ID NO: 5478 - protein, 11 aa, Homo sapiens
FEDLEVSTFER

SEQ ID NO: 5479 - protein, 14 aa, Homo sapiens
LMSINYLGSVYPSR

SEQ ID NO: 5480 - protein, 10 aa, Homo sapiens
QGAFITLVAR

SEQ ID NO: 5481 - protein, 15 aa, Homo sapiens
NNYSEDLELASLLIK

SEQ ID NO: 5482 - protein, 17 aa, Homo sapiens
GVLDVPACQIAIRPEGK

SEQ ID NO: 5483 - protein, 9 aa, Homo sapiens
FSDVLHTIK

SEQ ID NO: 5484 - protein, 14 aa, Homo sapiens
LSEPVPQTNAHESK

SEQ ID NO: 5485 - protein, 9 aa, Homo sapiens
AQAEHMLMR

SEQ ID NO: 5486 - protein, 9 aa, Homo sapiens
EWYHASLTR

SEQ ID NO: 5487 - protein, 15 aa, Homo sapiens
GLEPCAISIEVLGAR

SEQ ID NO: 5488 - protein, 12 aa, Homo sapiens
GSDASGQLFHGR

SEQ ID NO: 5489 - protein, 15 aa, Homo sapiens
IGTAEPDYGALYEGR

SEQ ID NO: 5490 - protein, 9 aa, Homo sapiens
NMLSQVNYR

SEQ ID NO: 5491 - protein, 14 aa, Homo sapiens
SGDITYGQFAQLYR

SEQ ID NO: 5492 - protein, 13 aa, Homo sapiens
TMDLPFLEASTLR

SEQ ID NO: 5493 - protein, 11 aa, Homo sapiens
WAPGSVKPIYK

SEQ ID NO: 5494 - protein, 9 aa, Homo sapiens
EVVETQEGK

SEQ ID NO: 5495 - protein, 8 aa, Homo sapiens
LPEGVVPK

SEQ ID NO: 5496 - protein, 11 aa, Homo sapiens
KITGLCQEEHR

SEQ ID NO: 5497 - protein, 12 aa, Homo sapiens
GFREVVETQEGK

SEQ ID NO: 5498 - protein, 16 aa, Homo sapiens
ESPNPPNPSGQCPICR

SEQ ID NO: 5499 - protein, 10 aa, Homo sapiens
ITGLCQEEHR

SEQ ID NO: 5500 - protein, 9 aa, Homo sapiens
MPVGSPLLR

SEQ ID NO: 5501 - protein, 22 aa, Homo sapiens
YNYDDVLLLSQFIRPHGGMLPR

SEQ ID NO: 5502 - protein, 21 aa, Homo sapiens
SVAEGLSGSLVQEPFQLATEK

SEQ ID NO: 5503 - protein, 16 aa, Homo sapiens
MPTKEDEEEDEPVVIK

SEQ ID NO: 5504 - protein, 8 aa, Homo sapiens
HQLEEELR

SEQ ID NO: 5505 - protein, 7 aa, Homo sapiens
SVDFHFR

SEQ ID NO: 5506 - protein, 12 aa, Homo sapiens
AFALNDLDDYEK

SEQ ID NO: 5507 - protein, 22 aa, Homo sapiens
LSQERPGVLLNQFPCENLLTVK

SEQ ID NO: 5508 - protein, 15 aa, Homo sapiens
FNQTYQLAHGTAEEK

SEQ ID NO: 5509 - protein, 10 aa, Homo sapiens
AMYAVDLMLK

SEQ ID NO: 5510 - protein, 14 aa, Homo sapiens
HFTVMNYDPDVVLK

SEQ ID NO: 5511 - protein, 20 aa, Homo sapiens
FTLTQSEADADILFNFSHFK

SEQ ID NO: 5512 - protein, 17 aa, Homo sapiens
LPLDINPVVHPHGHIFK

SEQ ID NO: 5513 - protein, 13 aa, Homo sapiens
KQQPNPGNELCYK

SEQ ID NO: 5514 - protein, 12 aa, Homo sapiens
QQPNPGNELCYK

SEQ ID NO: 5515 - protein, 13 aa, Homo sapiens
QVHCEEFIPEFEK

SEQ ID NO: 5516 - protein, 12 aa, Homo sapiens
AGGPEGPPWLPR

SEQ ID NO: 5517 - protein, 8 aa, Homo sapiens
DCLASIAR

SEQ ID NO: 5518 - protein, 12 aa, Homo sapiens
DFAYGETDPLIR

SEQ ID NO: 5519 - protein, 10 aa, Homo sapiens
DLDTGEEVTR

SEQ ID NO: 5520 - protein, 22 aa, Homo sapiens
ESGLQAAHPNSIFLIDHAWTCR

SEQ ID NO: 5521 - protein, 29 aa, Homo sapiens
LEHEVFDAGEVFGIMQVEEVEEEEDEAAR

SEQ ID NO: 5522 - protein, 13 aa, Homo sapiens
MPVWYIMDEFGSR

SEQ ID NO: 5523 - protein, 12 aa, Homo sapiens
QQLQQVPGLLHR

SEQ ID NO: 5524 - protein, 16 aa, Homo sapiens
QYPEFPWTDVQAEIFR

SEQ ID NO: 5525 - protein, 7 aa, Homo sapiens
SLHSIIR

SEQ ID NO: 5526 - protein, 26 aa, Homo sapiens
SSPGQTPEEGAQALAEFAALHGPALR

SEQ ID NO: 5527 - protein, 13 aa, Homo sapiens
TELPQFVSYFQQR

SEQ ID NO: 5528 - protein, 17 aa, Homo sapiens
VMQPQILEVNFNPDCER

SEQ ID NO: 5529 - protein, 16 aa, Homo sapiens
VYTDVQQVASSLTHPR

SEQ ID NO: 5530 - protein, 10 aa, Homo sapiens
YIESPVLFLR

SEQ ID NO: 5531 - protein, 15 aa, Homo sapiens
DTGKTPVEPEVAIHR

SEQ ID NO: 5532 - protein, 13 aa, Homo sapiens
RLIDLHSPSEIVK

SEQ ID NO: 5533 - protein, 12 aa, Homo sapiens
LIDLHSPSEIVK

SEQ ID NO: 5534 - protein, 11 aa, Homo sapiens
TPVEPEVAIHR

SEQ ID NO: 5535 - protein, 7 aa, Homo sapiens
VCADLIR

SEQ ID NO: 5536 - protein, 14 aa, Homo sapiens
VNMVTASYITPALK

SEQ ID NO: 5537 - protein, 15 aa, Homo sapiens
YAEIYGISSAHTLLR

SEQ ID NO: 5538 - protein, 9 aa, Homo sapiens
TPKEDLCSK

SEQ ID NO: 5539 - protein, 9 aa, Homo sapiens
VWKPQLFER

SEQ ID NO: 5540 - protein, 12 aa, Homo sapiens
LLEEKDPVPLFK

SEQ ID NO: 5541 - protein, 7 aa, Homo sapiens
YPVWLWK

SEQ ID NO: 5542 - protein, 13 aa, Homo sapiens
TPTPVHYRPHGAK

SEQ ID NO: 5543 - protein, 10 aa, Homo sapiens
EFYSEILDKK

SEQ ID NO: 5544 - protein, 18 aa, Homo sapiens
ERVEDVPIPIYFPPESQR

SEQ ID NO: 5545 - protein, 7 aa, Homo sapiens
LPGHYLR

SEQ ID NO: 5546 - protein, 13 aa, Homo sapiens
QDPQLHPEDPERR

SEQ ID NO: 5547 - protein, 12 aa, Homo sapiens
AAVLKPVLLGLR

SEQ ID NO: 5548 - protein, 15 aa, Homo sapiens
LGGIPDALPTVAAPR

SEQ ID NO: 5549 - protein, 15 aa, Homo sapiens
ISFPPEYPFKPPMIK

SEQ ID NO: 5550 - protein, 9 aa, Homo sapiens
KNAEEFTLR

SEQ ID NO: 5551 - protein, 15 aa, Homo sapiens
MDLADLLTQNPELFR

SEQ ID NO: 5552 - protein, 8 aa, Homo sapiens
NAEEFTLR

SEQ ID NO: 5553 - protein, 17 aa, Homo sapiens
LDNGALLCQLAETMQEK

SEQ ID NO: 5554 - protein, 11 aa, Homo sapiens
STGNLLDDAVK

SEQ ID NO: 5555 - protein, 9 aa, Homo sapiens
HEANLLPMK

SEQ ID NO: 5556 - protein, 10 aa, Homo sapiens
EITAETFMEK

SEQ ID NO: 5557 - protein, 20 aa, Homo sapiens
EIEQEETLSAPSPSPSPSSK

SEQ ID NO: 5558 - protein, 14 aa, Homo sapiens
VGGGWETFAGYLLK

SEQ ID NO: 5559 - protein, 10 aa, Homo sapiens
YGVEPPGLIK

SEQ ID NO: 5560 - protein, 11 aa, Homo sapiens
DNTANFLSWCR

SEQ ID NO: 5561 - protein, 13 aa, Homo sapiens
EDLALWLTNLLGK

SEQ ID NO: 5562 - protein, 11 aa, Homo sapiens
EVCLCLLELGR

SEQ ID NO: 5563 - protein, 12 aa, Homo sapiens
FKESMDANKPTK

SEQ ID NO: 5564 - protein, 18 aa, Homo sapiens
SGPGLSDMHQYSQWLASR

SEQ ID NO: 5565 - protein, 11 aa, Homo sapiens
TSAPSGSFFAR

SEQ ID NO: 5566 - protein, 11 aa, Homo sapiens
GTNIQENEYVK

SEQ ID NO: 5567 - protein, 15 aa, Homo sapiens
KVQTESSTGSVGSNR

SEQ ID NO: 5568 - protein, 13 aa, Homo sapiens
MGAYHTIELEPNR

SEQ ID NO: 5569 - protein, 14 aa, Homo sapiens
VQTESSTGSVGSNR

SEQ ID NO: 5570 - protein, 16 aa, Homo sapiens
YYRPTEVDFLQGDCTK

SEQ ID NO: 5571 - protein, 14 aa, Homo sapiens
LHYGDLTDSTCLVK

SEQ ID NO: 5572 - protein, 12 aa, Homo sapiens
FYQASTSELYGK

SEQ ID NO: 5573 - protein, 11 aa, Homo sapiens
NPQAHIEGNMK

SEQ ID NO: 5574 - protein, 17 aa, Homo sapiens
IYLGQLECFSLGNLDAK

SEQ ID NO: 5575 - protein, 9 aa, Homo sapiens
GYEVHGIVR

SEQ ID NO: 5576 - protein, 15 aa, Homo sapiens
VTVGDITCTGEGTSK

SEQ ID NO: 5577 - protein, 9 aa, Homo sapiens
LESFMETGK

SEQ ID NO: 5578 - protein, 15 aa, Homo sapiens
LPEYTLSQEGGPAHK

SEQ ID NO: 5579 - protein, 19 aa, Homo sapiens
SLLSIPNTDYIQLLSEIAK

SEQ ID NO: 5580 - protein, 19 aa, Homo sapiens
ANASICFAVPDPLMPDPSK

SEQ ID NO: 5581 - protein, 12 aa, Homo sapiens
TPIQVLHEYGMK

SEQ ID NO: 5582 - protein, 10 aa, Homo sapiens
AAEAAINILK

SEQ ID NO: 5583 - protein, 9 aa, Homo sapiens
NIPVYECER

SEQ ID NO: 5584 - protein, 19 aa, Homo sapiens
NQLNPIGSLQELAIHHGWR

SEQ ID NO: 5585 - protein, 13 aa, Homo sapiens
SDVQIHVPTFTFR

SEQ ID NO: 5586 - protein, 11 aa, Homo sapiens
EASSVSEELHK

SEQ ID NO: 5587 - protein, 15 aa, Homo sapiens
AAYNVTLLNFMDPQK

SEQ ID NO: 5588 - protein, 14 aa, Homo sapiens
NEILTAILASLTAR

SEQ ID NO: 5589 - protein, 12 aa, Homo sapiens
IQAYDYLECSAK

SEQ ID NO: 5590 - protein, 14 aa, Homo sapiens
HFCPNVPIILVANK

SEQ ID NO: 5591 - protein, 15 aa, Homo sapiens
LKDLDLDAFAEELER

SEQ ID NO: 5592 - protein, 15 aa, Homo sapiens
HETEQFPAEPLELAK

SEQ ID NO: 5593 - protein, 22 aa, Homo sapiens
TSFDDRLEDDDFDLIEENLGVK

SEQ ID NO: 5594 - protein, 16 aa, Homo sapiens
DMYTICQSAGLDGLAK

SEQ ID NO: 5595 - protein, 12 aa, Homo sapiens
DVDEAHYAYSFK

SEQ ID NO: 5596 - protein, 10 aa, Homo sapiens
VFMNCAGFLK

SEQ ID NO: 5597 - protein, 22 aa, Homo sapiens
MQAYQYEQISADPDKPLADGIR

SEQ ID NO: 5598 - protein, 11 aa, Homo sapiens
DAQMLIEDVKR

SEQ ID NO: 5599 - protein, 16 aa, Homo sapiens
GVEGYGNDQTYFEEIK

SEQ ID NO: 5600 - protein, 13 aa, Homo sapiens
SPNTEEIFNMLTK

SEQ ID NO: 5601 - protein, 12 aa, Homo sapiens
TQLVTMCHMGPK

SEQ ID NO: 5602 - protein, 8 aa, Homo sapiens
IMKIDIEK

SEQ ID NO: 5603 - protein, 20 aa, Homo sapiens
AIAHPYSQALIQYVCGLGPR

SEQ ID NO: 5604 - protein, 9 aa, Homo sapiens
ALDTTDMER

SEQ ID NO: 5605 - protein, 12 aa, Homo sapiens
DEFSHQVQEWNR

SEQ ID NO: 5606 - protein, 18 aa, Homo sapiens
DYVCSQFPTPEAVLEGAR

SEQ ID NO: 5607 - protein, 13 aa, Homo sapiens
FGLTPEQFGENLR

SEQ ID NO: 5608 - protein, 8 aa, Homo sapiens
FLLGYQPR

SEQ ID NO: 5609 - protein, 8 aa, Homo sapiens
HITLYDIR

SEQ ID NO: 5610 - protein, 21 aa, Homo sapiens
IDTASLGDSTDSYIEVLDGSR

SEQ ID NO: 5611 - protein, 19 aa, Homo sapiens
NAFATPTISLQESCDYLDR

SEQ ID NO: 5612 - protein, 13 aa, Homo sapiens
NQHFEVPFIAFYR

SEQ ID NO: 5613 - protein, 12 aa, Homo sapiens
RPQGESYDQAIR

SEQ ID NO: 5614 - protein, 24 aa, Homo sapiens
SIFEMYEPSELESSHLTDQDNEIR

SEQ ID NO: 5615 - protein, 19 aa, Homo sapiens
TPASINATPANINLADLTR

SEQ ID NO: 5616 - protein, 10 aa, Homo sapiens
VHPETYEWAR

SEQ ID NO: 5617 - protein, 10 aa, Homo sapiens
VLGIAFSSAR

SEQ ID NO: 5618 - protein, 10 aa, Homo sapiens
VNEVGVDVNR

SEQ ID NO: 5619 - protein, 11 aa, Homo sapiens
VYTSMSDCLIK

SEQ ID NO: 5620 - protein, 15 aa, Homo sapiens
GVNEDTYSGILDCAR

SEQ ID NO: 5621 - protein, 33 aa, Homo sapiens
ILAAQGQLSAQGGAQPSVEAPAAPRPTATQLTR

SEQ ID NO: 5622 - protein, 8 aa, Homo sapiens
LAANDFFR

SEQ ID NO: 5623 - protein, 8 aa, Homo sapiens
PTATQLTR

SEQ ID NO: 5624 - protein, 10 aa, Homo sapiens
VTIYQVPLPK

SEQ ID NO: 5625 - protein, 27 aa, Homo sapiens
DSTGAADPPQPHIVGIQSPDQQAALAR

SEQ ID NO: 5626 - protein, 11 aa, Homo sapiens
FMNVNPFPVPR

SEQ ID NO: 5627 - protein, 15 aa, Homo sapiens
VFPNQVLKPFLEDSK

SEQ ID NO: 5628 - protein, 21 aa, Homo sapiens
YQNLLPLFVGHNMLLVSEEPK

SEQ ID NO: 5629 - protein, 10 aa, Homo sapiens
EIAAVFQDNR

SEQ ID NO: 5630 - protein, 19 aa, Homo sapiens
TVPFLPLLGGCIDDTILSR

SEQ ID NO: 5631 - protein, 9 aa, Homo sapiens
VVGAFPMAK

SEQ ID NO: 5632 - protein, 10 aa, Homo sapiens
MVVGAFPMAK

SEQ ID NO: 5633 - protein, 9 aa, Homo sapiens
QVSKPLANR

SEQ ID NO: 5634 - protein, 8 aa, Homo sapiens
AQLCNPGR

SEQ ID NO: 5635 - protein, 7 aa, Homo sapiens
LLYLGIR

SEQ ID NO: 5636 - protein, 10 aa, Homo sapiens
DKYENEDLIK

SEQ ID NO: 5637 - protein, 11 aa, Homo sapiens
EVLMDCAHLVK

SEQ ID NO: 5638 - protein, 16 aa, Homo sapiens
AFEHLQQLELIKPMER

SEQ ID NO: 5639 - protein, 9 aa, Homo sapiens
LDILELLEK

SEQ ID NO: 5640 - protein, 14 aa, Homo sapiens
LLLDNTQIMNALQK

SEQ ID NO: 5641 - protein, 14 aa, Homo sapiens
VNSTTKPEDGGLKK

SEQ ID NO: 5642 - protein, 9 aa, Homo sapiens
VLLSLLSIK

SEQ ID NO: 5643 - protein, 11 aa, Homo sapiens
GLGETATVLTK

SEQ ID NO: 5644 - protein, 14 aa, Homo sapiens
LLTLFNPDLANNYK

SEQ ID NO: 5645 - protein, 13 aa, Homo sapiens
QTNDVLLTFEALK

SEQ ID NO: 5646 - protein, 16 aa, Homo sapiens
TFNATDYKPIATIDVK

SEQ ID NO: 5647 - protein, 12 aa, Homo sapiens
AELTTLLEQWEK

SEQ ID NO: 5648 - protein, 10 aa, Homo sapiens
ELQLQEVALR

SEQ ID NO: 5649 - protein, 10 aa, Homo sapiens
LGFSSSDPDR

SEQ ID NO: 5650 - protein, 10 aa, Homo sapiens
MPITDADQIR

SEQ ID NO: 5651 - protein, 22 aa, Homo sapiens
NCATFNPTDDLVLNDGVLWDVR

SEQ ID NO: 5652 - protein, 8 aa, Homo sapiens
SPFGSSFR

SEQ ID NO: 5653 - protein, 8 aa, Homo sapiens
YAAELIER

SEQ ID NO: 5654 - protein, 12 aa, Homo sapiens
SIKDTICNQDER

SEQ ID NO: 5655 - protein, 10 aa, Homo sapiens
NADPILISLK

SEQ ID NO: 5656 - protein, 12 aa, Homo sapiens
TTDTASVQNEAK

SEQ ID NO: 5657 - protein, 13 aa, Homo sapiens
KTTDTASVQNEAK

SEQ ID NO: 5658 - protein, 8 aa, Homo sapiens
CDLISIPK

SEQ ID NO: 5659 - protein, 29 aa, Homo sapiens
KSDLFQDDLYPDTAGPEAALEAEEWFEGK

SEQ ID NO: 5660 - protein, 8 aa, Homo sapiens
QLALWNPK

SEQ ID NO: 5661 - protein, 7 aa, Homo sapiens
HGYIPGK

SEQ ID NO: 5662 - protein, 11 aa, Homo sapiens
KCEPIIMTVPR

SEQ ID NO: 5663 - protein, 20 aa, Homo sapiens
YFEITDESPYVHYLNTFSSK

SEQ ID NO: 5664 - protein, 8 aa, Homo sapiens
HVFGQAVK

SEQ ID NO: 5665 - protein, 11 aa, Homo sapiens
NILDSKPTANK

SEQ ID NO: 5666 - protein, 16 aa, Homo sapiens
AIFLADGNVFTTGFSR

SEQ ID NO: 5667 - protein, 9 aa, Homo sapiens
NDQCYDDIR

SEQ ID NO: 5668 - protein, 11 aa, Homo sapiens
VGIVAWHPTAR

SEQ ID NO: 5669 - protein, 13 aa, Homo sapiens
VTWDSSFCAVNPR

SEQ ID NO: 5670 - protein, 11 aa, Homo sapiens
LQVLGTNSFVK

SEQ ID NO: 5671 - protein, 11 aa, Homo sapiens
IVPSLLFNMQK

SEQ ID NO: 5672 - protein, 13 aa, Homo sapiens
APFEEIAAQCESK

SEQ ID NO: 5673 - protein, 13 aa, Homo sapiens
FANIEEDTPSYHR

SEQ ID NO: 5674 - protein, 16 aa, Homo sapiens
GSIGPTVLEVFNTLLK

SEQ ID NO: 5675 - protein, 14 aa, Homo sapiens
IAESLGGSGYSVER

SEQ ID NO: 5676 - protein, 22 aa, Homo sapiens
IVQNAIIQTIGFFGSNLPDYQR

SEQ ID NO: 5677 - protein, 8 aa, Homo sapiens
RYDFFVSR

SEQ ID NO: 5678 - protein, 14 aa, Homo sapiens
TMEAPYFLPEHIFR

SEQ ID NO: 5679 - protein, 22 aa, Homo sapiens
VPVFGTSTHTLDISQLGDLGTR

SEQ ID NO: 5680 - protein, 8 aa, Homo sapiens
KYGLNMCR

SEQ ID NO: 5681 - protein, 8 aa, Homo sapiens
DIGFIKLD

SEQ ID NO: 5682 - protein, 11 aa, Homo sapiens
GHQQLYWSHPR

SEQ ID NO: 5683 - protein, 7 aa, Homo sapiens
YGLNMCR

SEQ ID NO: 5684 - protein, 16 aa, Homo sapiens
VEDLCCTLYDMLASIK

SEQ ID NO: 5685 - protein, 11 aa, Homo sapiens
TEGDIFAIVSK

SEQ ID NO: 5686 - protein, 19 aa, Homo sapiens
IISHFSQDDLTALVQMTEK

SEQ ID NO: 5687 - protein, 9 aa, Homo sapiens
AVILVHDIK

SEQ ID NO: 5688 - protein, 13 aa, Homo sapiens
TNFISSHTEKPVR

SEQ ID NO: 5689 - protein, 19 aa, Homo sapiens
FLNEHLQEACTPELKPVEK

SEQ ID NO: 5690 - protein, 16 aa, Homo sapiens
SKDEGWFLILGEVDKR

SEQ ID NO: 5691 - protein, 15 aa, Homo sapiens
YNTIETFNELFDAHK

SEQ ID NO: 5692 - protein, 21 aa, Homo sapiens
HPPHTELLDLQPLPITALGCK

SEQ ID NO: 5693 - protein, 8 aa, Homo sapiens
FLSHLIEK

SEQ ID NO: 5694 - protein, 20 aa, Homo sapiens
LIMNPSYYNLGDVSHDSVNK

SEQ ID NO: 5695 - protein, 10 aa, Homo sapiens
ADLIVTTPEK

SEQ ID NO: 5696 - protein, 12 aa, Homo sapiens
ALAAEMTDYFSR

SEQ ID NO: 5697 - protein, 21 aa, Homo sapiens
GEMDSFSLISDSAYVAQNAAR

SEQ ID NO: 5698 - protein, 12 aa, Homo sapiens
IVGLSTALANAR

SEQ ID NO: 5699 - protein, 11 aa, Homo sapiens
LSHYLTLLTQR

SEQ ID NO: 5700 - protein, 9 aa, Homo sapiens
LWGWASPLR

SEQ ID NO: 5701 - protein, 12 aa, Homo sapiens
SVGDVALSQIVR

SEQ ID NO: 5702 - protein, 13 aa, Homo sapiens
TNIAMLTVLHEIR

SEQ ID NO: 5703 - protein, 10 aa, Homo sapiens
TVAAELAIFR

SEQ ID NO: 5704 - protein, 8 aa, Homo sapiens
TVLDQALR

SEQ ID NO: 5705 - protein, 15 aa, Homo sapiens
YVDFPITDVLQMMGR

SEQ ID NO: 5706 - protein, 14 aa, Homo sapiens
IAGAIGPCVSLNVK

SEQ ID NO: 5707 - protein, 13 aa, Homo sapiens
FGQYNKEDPTSFR

SEQ ID NO: 5708 - protein, 7 aa, Homo sapiens
SWHDIEK

SEQ ID NO: 5709 - protein, 13 aa, Homo sapiens
MVVPLACLLTPLK

SEQ ID NO: 5710 - protein, 7 aa, Homo sapiens
FLQPVHK

SEQ ID NO: 5711 - protein, 26 aa, Homo sapiens
IMLFTGGPPTQGPGMVVGDELKIPIR

SEQ ID NO: 5712 - protein, 10 aa, Homo sapiens
QIQDMLGLTK

SEQ ID NO: 5713 - protein, 14 aa, Homo sapiens
MVQVHELSCEGISK

SEQ ID NO: 5714 - protein, 18 aa, Homo sapiens
GPCVSENELGVGGTSQWK

SEQ ID NO: 5715 - protein, 22 aa, Homo sapiens
IMLFTGGPPTQGPGMVVGDELK

SEQ ID NO: 5716 - protein, 9 aa, Homo sapiens
DPWPVTQGK

SEQ ID NO: 5717 - protein, 13 aa, Homo sapiens
AGYQDMPEYENFK

SEQ ID NO: 5718 - protein, 11 aa, Homo sapiens
SWHDIEKDNAR

SEQ ID NO: 5719 - protein, 11 aa, Homo sapiens
AESEEGPDVLR

SEQ ID NO: 5720 - protein, 13 aa, Homo sapiens
ATYLEFIQQNEER

SEQ ID NO: 5721 - protein, 17 aa, Homo sapiens
ATYLEFIQQNEERDGVR

SEQ ID NO: 5722 - protein, 12 aa, Homo sapiens
AVLNPLCQVDYR

SEQ ID NO: 5723 - protein, 17 aa, Homo sapiens
ERPDLPPVQYEPVLCSR

SEQ ID NO: 5724 - protein, 10 aa, Homo sapiens
FSWNVWPSSR

SEQ ID NO: 5725 - protein, 16 aa, Homo sapiens
GAIQFVTHYQHSSTQR

SEQ ID NO: 5726 - protein, 17 aa, Homo sapiens
HIEAAFDQEAAAVLMAR

SEQ ID NO: 5727 - protein, 17 aa, Homo sapiens
HLLQAPLDDAQEILQAR

SEQ ID NO: 5728 - protein, 8 aa, Homo sapiens
HYEMLANR

SEQ ID NO: 5729 - protein, 29 aa, Homo sapiens
ICGLDPTSTLGIYFEVVNQHNTPIPQGGR

SEQ ID NO: 5730 - protein, 14 aa, Homo sapiens
IDMNLTDLLGELQR

SEQ ID NO: 5731 - protein, 16 aa, Homo sapiens
LSDSFSLYPQFMFHLR

SEQ ID NO: 5732 - protein, 10 aa, Homo sapiens
LWACNFCFQR

SEQ ID NO: 5733 - protein, 10 aa, Homo sapiens
NWADVQSQLR

SEQ ID NO: 5734 - protein, 9 aa, Homo sapiens
PAMPMQQAR

SEQ ID NO: 5735 - protein, 13 aa, Homo sapiens
PAQPQEHPFASSR

SEQ ID NO: 5736 - protein, 18 aa, Homo sapiens
SPFLQVFNNSPDESSYYR

SEQ ID NO: 5737 - protein, 12 aa, Homo sapiens
YINTEHGGSQAR

SEQ ID NO: 5738 - protein, 15 aa, Homo sapiens
DPAETLHLSEPLGGK

SEQ ID NO: 5739 - protein, 18 aa, Homo sapiens
ASYGHSMVVDPWGTVVAR

SEQ ID NO: 5740 - protein, 7 aa, Homo sapiens
IDLNYLR

SEQ ID NO: 5741 - protein, 10 aa, Homo sapiens
LLEEYTQLAR

SEQ ID NO: 5742 - protein, 10 aa, Homo sapiens
IYGFYDECKR

SEQ ID NO: 5743 - protein, 17 aa, Homo sapiens
EIFLSQPILLELEAPLK

SEQ ID NO: 5744 - protein, 11 aa, Homo sapiens
IKYPENFFLLR

SEQ ID NO: 5745 - protein, 11 aa, Homo sapiens
LLEVQGSRPGK

SEQ ID NO: 5746 - protein, 13 aa, Homo sapiens
QSLETICLLLAYK

SEQ ID NO: 5747 - protein, 18 aa, Homo sapiens
TFTDCFNCLPIAAIVDEK

SEQ ID NO: 5748 - protein, 9 aa, Homo sapiens
IYGFYDECK

SEQ ID NO: 5749 - protein, 14 aa, Homo sapiens
AHQVVEDGYEFFAK

SEQ ID NO: 5750 - protein, 10 aa, Homo sapiens
DVQGWGENDR

SEQ ID NO: 5751 - protein, 10 aa, Homo sapiens
GNHECASINR

SEQ ID NO: 5752 - protein, 8 aa, Homo sapiens
HDLDLICR

SEQ ID NO: 5753 - protein, 14 aa, Homo sapiens
ICGDIHGQYYDLLR

SEQ ID NO: 5754 - protein, 19 aa, Homo sapiens
IFCCHGGLSPDLQSMEQIR

SEQ ID NO: 5755 - protein, 9 aa, Homo sapiens
LNLDSIIGR

SEQ ID NO: 5756 - protein, 10 aa, Homo sapiens
NVQLTENEIR

SEQ ID NO: 5757 - protein, 18 aa, Homo sapiens
YGQFSGLNPGGRPITPPR

SEQ ID NO: 5758 - protein, 9 aa, Homo sapiens
YPENFFLLR

SEQ ID NO: 5759 - protein, 8 aa, Homo sapiens
VPYFIDLK

SEQ ID NO: 5760 - protein, 10 aa, Homo sapiens
KLYSIAAPAR

SEQ ID NO: 5761 - protein, 17 aa, Homo sapiens
ETPPDALILESPFTNIR

SEQ ID NO: 5762 - protein, 12 aa, Homo sapiens
GWGDSVGTPSER

SEQ ID NO: 5763 - protein, 23 aa, Homo sapiens
HISCPLLILHAEDDPVVPFQLGR

SEQ ID NO: 5764 - protein, 10 aa, Homo sapiens
LTGPAAAEPR

SEQ ID NO: 5765 - protein, 23 aa, Homo sapiens
SGDNPVYIWGHSLGTGVATNLVR

SEQ ID NO: 5766 - protein, 9 aa, Homo sapiens
SHPFSVIYR

SEQ ID NO: 5767 - protein, 10 aa, Homo sapiens
TEPVALEHER

SEQ ID NO: 5768 - protein, 15 aa, Homo sapiens
VLSSLGYHVVTFDYR

SEQ ID NO: 5769 - protein, 13 aa, Homo sapiens
VQFVPFHSDLGYR

SEQ ID NO: 5770 - protein, 9 aa, Homo sapiens
LHLQTVPSK

SEQ ID NO: 5771 - protein, 19 aa, Homo sapiens
GDKPVTYEEAHAPHYIAHR

SEQ ID NO: 5772 - protein, 12 aa, Homo sapiens
GNQLEICAVVLR

SEQ ID NO: 5773 - protein, 10 aa, Homo sapiens
LFFPVIYDVK

SEQ ID NO: 5774 - protein, 12 aa, Homo sapiens
EMFFEDHIDDAK

SEQ ID NO: 5775 - protein, 20 aa, Homo sapiens
IGPQHQAGSDSLLTGMAFFK

SEQ ID NO: 5776 - protein, 14 aa, Homo sapiens
GGLQEVAEQLELER

SEQ ID NO: 5777 - protein, 12 aa, Homo sapiens
CYADTMFSLLGK

SEQ ID NO: 5778 - protein, 15 aa, Homo sapiens
HPGPPFYVPHAEIER

SEQ ID NO: 5779 - protein, 7 aa, Homo sapiens
VDAFEER

SEQ ID NO: 5780 - protein, 9 aa, Homo sapiens
LGGLWGLLK

SEQ ID NO: 5781 - protein, 20 aa, Homo sapiens
QPNLPSPGTLAPTTLQGVVK

SEQ ID NO: 5782 - protein, 28 aa, Homo sapiens
VMAAAQAAHADDFIQEMEHGIYTDVGEK

SEQ ID NO: 5783 - protein, 10 aa, Homo sapiens
QDLGFFQETK

SEQ ID NO: 5784 - protein, 18 aa, Homo sapiens
FQDVSFAYPNRPDRPVLK

SEQ ID NO: 5785 - protein, 10 aa, Homo sapiens
EAVGGLQTVR

SEQ ID NO: 5786 - protein, 9 aa, Homo sapiens
EQLFSSLLR

SEQ ID NO: 5787 - protein, 10 aa, Homo sapiens
GGCFTYTMSR

SEQ ID NO: 5788 - protein, 11 aa, Homo sapiens
IREQLFSSLLR

SEQ ID NO: 5789 - protein, 13 aa, Homo sapiens
LAQLQEGQDLYSR

SEQ ID NO: 5790 - protein, 21 aa, Homo sapiens
LSSDTTLMSNWLPLNANVLLR

SEQ ID NO: 5791 - protein, 11 aa, Homo sapiens
SFGAEEHEVCR

SEQ ID NO: 5792 - protein, 25 aa, Homo sapiens
VLILDEATSALDVQCEQALQDWNSR

SEQ ID NO: 5793 - protein, 20 aa, Homo sapiens
GHDDLGDHYLDCGDLSNALK

SEQ ID NO: 5794 - protein, 11 aa, Homo sapiens
AESTPEIAEQR

SEQ ID NO: 5795 - protein, 16 aa, Homo sapiens
ALIQYFSPYVSADMHR

SEQ ID NO: 5796 - protein, 11 aa, Homo sapiens
CAAGLAELAAR

SEQ ID NO: 5797 - protein, 10 aa, Homo sapiens
LFLELEPQVR

SEQ ID NO: 5798 - protein, 12 aa, Homo sapiens
LQFIADHCPTLR

SEQ ID NO: 5799 - protein, 8 aa, Homo sapiens
MALSFVQR

SEQ ID NO: 5800 - protein, 7 aa, Homo sapiens
TLYTQIR

SEQ ID NO: 5801 - protein, 12 aa, Homo sapiens
KSEIEYYAMLAK

SEQ ID NO: 5802 - protein, 19 aa, Homo sapiens
TGVHHYSGNNIELGTACGK

SEQ ID NO: 5803 - protein, 11 aa, Homo sapiens
SEIEYYAMLAK

SEQ ID NO: 5804 - protein, 9 aa, Homo sapiens
KSLESINSR

SEQ ID NO: 5805 - protein, 12 aa, Homo sapiens
LVILANNCPALR

SEQ ID NO: 5806 - protein, 8 aa, Homo sapiens
SLESINSR

SEQ ID NO: 5807 - protein, 16 aa, Homo sapiens
VCTLAIIDPGDSDIIR

SEQ ID NO: 5808 - protein, 7 aa, Homo sapiens
AFQPLVK

SEQ ID NO: 5809 - protein, 12 aa, Homo sapiens
ALINSPEGAVGR

SEQ ID NO: 5810 - protein, 11 aa, Homo sapiens
GPWTCVGDMNR

SEQ ID NO: 5811 - protein, 10 aa, Homo sapiens
YLDESSGGWR

SEQ ID NO: 5812 - protein, 14 aa, Homo sapiens
QLVSDEDKAQLASK

SEQ ID NO: 5813 - protein, 7 aa, Homo sapiens
VGLIALK

SEQ ID NO: 5814 - protein, 15 aa, Homo sapiens
HVVTLLQVQDCHVLK

SEQ ID NO: 5815 - protein, 9 aa, Homo sapiens
LGMMPLWTK

SEQ ID NO: 5816 - protein, 7 aa, Homo sapiens
GFQGVMK

SEQ ID NO: 5817 - protein, 18 aa, Homo sapiens
SGTWWDEHLSEENVPFIK

SEQ ID NO: 5818 - protein, 32 aa, Homo sapiens
IFNITDNAAIKPGTPLYAAHFRPGQYVDVTAK

SEQ ID NO: 5819 - protein, 9 aa, Homo sapiens
MATLSVGGK

SEQ ID NO: 5820 - protein, 9 aa, Homo sapiens
ATSILEFYR

SEQ ID NO: 5821 - protein, 12 aa, Homo sapiens
RPGAVATGDIGR

SEQ ID NO: 5822 - protein, 13 aa, Homo sapiens
LQGEVVAFDYQSK

SEQ ID NO: 5823 - protein, 24 aa, Homo sapiens
LSQAYAISAGVSLEGQQLFQTIHK

SEQ ID NO: 5824 - protein, 14 aa, Homo sapiens
TETPPPLASLNVSK

SEQ ID NO: 5825 - protein, 17 aa, Homo sapiens
AAPPGEYFSVGSQVSCR

SEQ ID NO: 5826 - protein, 9 aa, Homo sapiens
EGSALSHVR

SEQ ID NO: 5827 - protein, 9 aa, Homo sapiens
HHPHFLTHK

SEQ ID NO: 5828 - protein, 8 aa, Homo sapiens
TFTWLVGK

SEQ ID NO: 5829 - protein, 11 aa, Homo sapiens
KRPETVATQFK

SEQ ID NO: 5830 - protein, 15 aa, Homo sapiens
GAPVGGHILSYLLEK

SEQ ID NO: 5831 - protein, 8 aa, Homo sapiens
KYEAFLQR

SEQ ID NO: 5832 - protein, 9 aa, Homo sapiens
IICDLVEEK

SEQ ID NO: 5833 - protein, 16 aa, Homo sapiens
DGTIDFTPGSELLITK

SEQ ID NO: 5834 - protein, 18 aa, Homo sapiens
VLQALGSEPIQYAVPVVK

SEQ ID NO: 5835 - protein, 14 aa, Homo sapiens
DQAVMISGESGAGK

SEQ ID NO: 5836 - protein, 15 aa, Homo sapiens
LLQSNPVLEAFGNAK

SEQ ID NO: 5837 - protein, 17 aa, Homo sapiens
GEELLSPLNLEQAAYAR

SEQ ID NO: 5838 - protein, 9 aa, Homo sapiens
LGTDEISPR

SEQ ID NO: 5839 - protein, 14 aa, Homo sapiens
LLQFYAETCPAPER

SEQ ID NO: 5840 - protein, 10 aa, Homo sapiens
NPIMSQCFDR

SEQ ID NO: 5841 - protein, 10 aa, Homo sapiens
SAICIQSWWR

SEQ ID NO: 5842 - protein, 8 aa, Homo sapiens
TSFLLNLR

SEQ ID NO: 5843 - protein, 19 aa, Homo sapiens
VNSININQGSITFAGGPGR

SEQ ID NO: 5844 - protein, 9 aa, Homo sapiens
YLGLLENLR

SEQ ID NO: 5845 - protein, 19 aa, Homo sapiens
NDLSICGTLHSVDQYLNIK

SEQ ID NO: 5846 - protein, 19 aa, Homo sapiens
LTDISVTDPEKYPHMLSVK

SEQ ID NO: 5847 - protein, 8 aa, Homo sapiens
MLFYSFFK

SEQ ID NO: 5848 - protein, 11 aa, Homo sapiens
LTDISVTDPEK

SEQ ID NO: 5849 - protein, 12 aa, Homo sapiens
SLVGKDVVVELK

SEQ ID NO: 5850 - protein, 19 aa, Homo sapiens
YVQLPADEVDTQLLQDAAR

SEQ ID NO: 5851 - protein, 33 aa, Homo sapiens
YLLSHGANIAAVNSDGDLPLDLAESDAMEGLLK

SEQ ID NO: 5852 - protein, 11 aa, Homo sapiens
GQEPQAPSSSK

SEQ ID NO: 5853 - protein, 12 aa, Homo sapiens
LLLQAGYDPELR

SEQ ID NO: 5854 - protein, 14 aa, Homo sapiens
SQESSTLEGGPSAR

SEQ ID NO: 5855 - protein, 15 aa, Homo sapiens
TVVNISSLCALQPFK

SEQ ID NO: 5856 - protein, 11 aa, Homo sapiens
LLSLLEKDEFK

SEQ ID NO: 5857 - protein, 10 aa, Homo sapiens
SGAHVDFYDK

SEQ ID NO: 5858 - protein, 15 aa, Homo sapiens
LLLINNAGSLGDVSK

SEQ ID NO: 5859 - protein, 10 aa, Homo sapiens
AVCLLTGASR

SEQ ID NO: 5860 - protein, 15 aa, Homo sapiens
DMLFQVLALEEPNVR

SEQ ID NO: 5861 - protein, 19 aa, Homo sapiens
VPADLGAEAGLQQLLGALR

SEQ ID NO: 5862 - protein, 10 aa, Homo sapiens
LGFITNNSSK

SEQ ID NO: 5863 - protein, 10 aa, Homo sapiens
QADIIGKPSR

SEQ ID NO: 5864 - protein, 15 aa, Homo sapiens
TILTLTGVSTLGDVK

SEQ ID NO: 5865 - protein, 14 aa, Homo sapiens
AVVVGFDPHFSYMK

SEQ ID NO: 5866 - protein, 11 aa, Homo sapiens
AAAEAGGDDAR

SEQ ID NO: 5867 - protein, 10 aa, Homo sapiens
FIAGTGCLVR

SEQ ID NO: 5868 - protein, 16 aa, Homo sapiens
FIFDCVSQEYGINPER

SEQ ID NO: 5869 - protein, 17 aa, Homo sapiens
YLQQPGCLLVGTNMDNR

SEQ ID NO: 5870 - protein, 10 aa, Homo sapiens
ALSMPLNGLK

SEQ ID NO: 5871 - protein, 23 aa, Homo sapiens
ALSMPLNGLKEEDKEPLIELFVK

SEQ ID NO: 5872 - protein, 22 aa, Homo sapiens
DEFTNTCPSDKEVEIAYSDVAK

SEQ ID NO: 5873 - protein, 18 aa, Homo sapiens
KFLDGNEMTLADCNLLPK

SEQ ID NO: 5874 - protein, 12 aa, Homo sapiens
GVVFSVTTVDLK

SEQ ID NO: 5875 - protein, 18 aa, Homo sapiens
TDVNKIEEFLEEVLCPPK

SEQ ID NO: 5876 - protein, 13 aa, Homo sapiens
EEDKEPLIELFVK

SEQ ID NO: 5877 - protein, 24 aa, Homo sapiens
KPADLQNLAPGTHPPFITFNSEVK

SEQ ID NO: 5878 - protein, 14 aa, Homo sapiens
HPESNTAGMDIFAK

SEQ ID NO: 5879 - protein, 17 aa, Homo sapiens
FLDGNEMTLADCNLLPK

SEQ ID NO: 5880 - protein, 13 aa, Homo sapiens
IEEFLEEVLCPPK

SEQ ID NO: 5881 - protein, 22 aa, Homo sapiens
LDEYLNSPLPDEIDENSMEDIK

SEQ ID NO: 5882 - protein, 25 aa, Homo sapiens
RKPADLQNLAPGTHPPFITFNSEVK

SEQ ID NO: 5883 - protein, 16 aa, Homo sapiens
AGSDGESIGNCPFSQR

SEQ ID NO: 5884 - protein, 12 aa, Homo sapiens
NSRPEANEALER

SEQ ID NO: 5885 - protein, 14 aa, Homo sapiens
KLDDAIEDCTNAVK

SEQ ID NO: 5886 - protein, 15 aa, Homo sapiens
HSGASAEVQKEEEKK

SEQ ID NO: 5887 - protein, 25 aa, Homo sapiens
AAAAECDVVMAATEPELLDDQEAKR

SEQ ID NO: 5888 - protein, 7 aa, Homo sapiens
ALELDHK

SEQ ID NO: 5889 - protein, 18 aa, Homo sapiens
LAYELYTEALGIDPNNIK

SEQ ID NO: 5890 - protein, 14 aa, Homo sapiens
HSGASAEVQKEEEK

SEQ ID NO: 5891 - protein, 13 aa, Homo sapiens
EVGEAFTILSDPK

SEQ ID NO: 5892 - protein, 12 aa, Homo sapiens
KDYNEAYNYYTK

SEQ ID NO: 5893 - protein, 10 aa, Homo sapiens
NANAVMEYEK

SEQ ID NO: 5894 - protein, 9 aa, Homo sapiens
AATLMMLGR

SEQ ID NO: 5895 - protein, 9 aa, Homo sapiens
AECLAMLGR

SEQ ID NO: 5896 - protein, 8 aa, Homo sapiens
ALMHHPDR

SEQ ID NO: 5897 - protein, 15 aa, Homo sapiens
AQCYMDTEQYEEAVR

SEQ ID NO: 5898 - protein, 10 aa, Homo sapiens
AVQFFVQALR

SEQ ID NO: 5899 - protein, 11 aa, Homo sapiens
EALGDAQQSVR

SEQ ID NO: 5900 - protein, 12 aa, Homo sapiens
MDSTNADALYVR

SEQ ID NO: 5901 - protein, 7 aa, Homo sapiens
VVFCMDR

SEQ ID NO: 5902 - protein, 13 aa, Homo sapiens
YPEAQSVASDILR

SEQ ID NO: 5903 - protein, 7 aa, Homo sapiens
KINFLMR

SEQ ID NO: 5904 - protein, 8 aa, Homo sapiens
IYNMEMAR

SEQ ID NO: 5905 - protein, 18 aa, Homo sapiens
TEHLGLNWFPNSVENILK

SEQ ID NO: 5906 - protein, 13 aa, Homo sapiens
LDAESDLQLAQIK

SEQ ID NO: 5907 - protein, 17 aa, Homo sapiens
LATDNIGYIDWDPYVPK

SEQ ID NO: 5908 - protein, 20 aa, Homo sapiens
SREDMTEAEQIIFDHFSDPK

SEQ ID NO: 5909 - protein, 11 aa, Homo sapiens
CVAEIIAGLIR

SEQ ID NO: 5910 - protein, 10 aa, Homo sapiens
LSTSSYSQVR

SEQ ID NO: 5911 - protein, 15 aa, Homo sapiens
SLNLPVGSSQVLVPR

SEQ ID NO: 5912 - protein, 8 aa, Homo sapiens
VMLQHELR

SEQ ID NO: 5913 - protein, 8 aa, Homo sapiens
DLKEEHLK

SEQ ID NO: 5914 - protein, 20 aa, Homo sapiens
TMIQQQGGSIVNVGSIVGLK

SEQ ID NO: 5915 - protein, 19 aa, Homo sapiens
AAAGDLGGDHLAFSCDVAK

SEQ ID NO: 5916 - protein, 15 aa, Homo sapiens
VNVVAPGFVHTDMTK

SEQ ID NO: 5917 - protein, 8 aa, Homo sapiens
AVAQLMAR

SEQ ID NO: 5918 - protein, 12 aa, Homo sapiens
VNFLVNAAGINR

SEQ ID NO: 5919 - protein, 10 aa, Homo sapiens
TALYNYIFAK

SEQ ID NO: 5920 - protein, 15 aa, Homo sapiens
FAPSPTGFLHLGGLR

SEQ ID NO: 5921 - protein, 17 aa, Homo sapiens
LEQVVPAFQDLVYGWNR

SEQ ID NO: 5922 - protein, 15 aa, Homo sapiens
LQDLVSPVYSYLWTR

SEQ ID NO: 5923 - protein, 10 aa, Homo sapiens
LQEESEVLQK

SEQ ID NO: 5924 - protein, 16 aa, Homo sapiens
GVDLFESFFPYQVTER

SEQ ID NO: 5925 - protein, 17 aa, Homo sapiens
LISGVSRPDEVLECIER

SEQ ID NO: 5926 - protein, 10 aa, Homo sapiens
SLLFLDNCLR

SEQ ID NO: 5927 - protein, 11 aa, Homo sapiens
LSMSLMEQLLK

SEQ ID NO: 5928 - protein, 23 aa, Homo sapiens
QPAADTEASEQQALHTVQYGLLK

SEQ ID NO: 5929 - protein, 11 aa, Homo sapiens
QLFLDVLDGTK

SEQ ID NO: 5930 - protein, 16 aa, Homo sapiens
VQRPPSAASAAPSSSK

SEQ ID NO: 5931 - protein, 11 aa, Homo sapiens
ELSQIEAELNK

SEQ ID NO: 5932 - protein, 17 aa, Homo sapiens
GAPSSPATGVLPSPQGK

SEQ ID NO: 5933 - protein, 10 aa, Homo sapiens
AAAAGGPCVR

SEQ ID NO: 5934 - protein, 18 aa, Homo sapiens
ASPESQEPLIQLVQAFVR

SEQ ID NO: 5935 - protein, 9 aa, Homo sapiens
ELWTILLGR

SEQ ID NO: 5936 - protein, 13 aa, Homo sapiens
HLVDETMDPFVDR

SEQ ID NO: 5937 - protein, 9 aa, Homo sapiens
IADYYYEER

SEQ ID NO: 5938 - protein, 14 aa, Homo sapiens
IPQGTVGQVMLDDR

SEQ ID NO: 5939 - protein, 12 aa, Homo sapiens
SLDAPSWPGVYR

SEQ ID NO: 5940 - protein, 16 aa, Homo sapiens
TEAPTWETHGNLMTER

SEQ ID NO: 5941 - protein, 18 aa, Homo sapiens
VISTDLSIADCLLPITSR

SEQ ID NO: 5942 - protein, 7 aa, Homo sapiens
WFVQCLR

SEQ ID NO: 5943 - protein, 17 aa, Homo sapiens
YNFLPEALDFVGVHQER

SEQ ID NO: 5944 - protein, 14 aa, Homo sapiens
LLSDTSVIQFYPSK

SEQ ID NO: 5945 - protein, 12 aa, Homo sapiens
GIGDPLVSVYAR

SEQ ID NO: 5946 - protein, 13 aa, Homo sapiens
ADSLLEDITDIPK

SEQ ID NO: 5947 - protein, 10 aa, Homo sapiens
YYSFFDLNPK

SEQ ID NO: 5948 - protein, 13 aa, Homo sapiens
GCEVVPDVNVAGR

SEQ ID NO: 5949 - protein, 15 aa, Homo sapiens
LLIPVADGMNEMYLR

SEQ ID NO: 5950 - protein, 21 aa, Homo sapiens
VVLEAPDETTLKELAETLQQK

SEQ ID NO: 5951 - protein, 13 aa, Homo sapiens
KVVLEAPDETTLK

SEQ ID NO: 5952 - protein, 12 aa, Homo sapiens
VVLEAPDETTLK

SEQ ID NO: 5953 - protein, 14 aa, Homo sapiens
DHPHTAAYLQELGR

SEQ ID NO: 5954 - protein, 16 aa, Homo sapiens
IPDEIIDMVKEEVVAK

SEQ ID NO: 5955 - protein, 10 aa, Homo sapiens
IPDEIIDMVK

SEQ ID NO: 5956 - protein, 12 aa, Homo sapiens
TAQNHPMLVELK

SEQ ID NO: 5957 - protein, 7 aa, Homo sapiens
MPECYIR

SEQ ID NO: 5958 - protein, 14 aa, Homo sapiens
LELGDVQALSLWQK

SEQ ID NO: 5959 - protein, 12 aa, Homo sapiens
STIIGNFIANLK

SEQ ID NO: 5960 - protein, 13 aa, Homo sapiens
GDTGVFLQYTHAR

SEQ ID NO: 5961 - protein, 12 aa, Homo sapiens
VGLAALIIQDFK

SEQ ID NO: 5962 - protein, 25 aa, Homo sapiens
ICDPGLTSFEPEALGNLVEGMDFHK

SEQ ID NO: 5963 - protein, 12 aa, Homo sapiens
DLKPENLLLASK

SEQ ID NO: 5964 - protein, 13 aa, Homo sapiens
NLINQMLTINPAK

SEQ ID NO: 5965 - protein, 14 aa, Homo sapiens
SATMVAAYLIQVHK

SEQ ID NO: 5966 - protein, 13 aa, Homo sapiens
YQSLGQCVYVHCK

SEQ ID NO: 5967 - protein, 17 aa, Homo sapiens
LSTVDMTGIPTLDNLQK

SEQ ID NO: 5968 - protein, 12 aa, Homo sapiens
AATALLEAGLAR

SEQ ID NO: 5969 - protein, 12 aa, Homo sapiens
GVITMNEEYETR

SEQ ID NO: 5970 - protein, 13 aa, Homo sapiens
IDPTVLLGALPLR

SEQ ID NO: 5971 - protein, 18 aa, Homo sapiens
DFAANVYEAFSTPQQLEK

SEQ ID NO: 5972 - protein, 18 aa, Homo sapiens
DMLESPDFSTVLNTCLNR

SEQ ID NO: 5973 - protein, 14 aa, Homo sapiens
TCNMTVLSMLPTLR

SEQ ID NO: 5974 - protein, 16 aa, Homo sapiens
AGDKPHMQTYEVDLNK

SEQ ID NO: 5975 - protein, 7 aa, Homo sapiens
SIEPYLK

SEQ ID NO: 5976 - protein, 8 aa, Homo sapiens
RIDTNLNK

SEQ ID NO: 5977 - protein, 11 aa, Homo sapiens
IYPLPHMYVIK

SEQ ID NO: 5978 - protein, 12 aa, Homo sapiens
IKNEVDSTLTFR

SEQ ID NO: 5979 - protein, 14 aa, Homo sapiens
DLVPDLSNFYAQYK

SEQ ID NO: 5980 - protein, 11 aa, Homo sapiens
CGPMVLDALIK

SEQ ID NO: 5981 - protein, 9 aa, Homo sapiens
CHTIMNCTR

SEQ ID NO: 5982 - protein, 9 aa, Homo sapiens
LQDPFSLYR

SEQ ID NO: 5983 - protein, 10 aa, Homo sapiens
QQYLQSIEER

SEQ ID NO: 5984 - protein, 12 aa, Homo sapiens
YLGPAVLMQAYR

SEQ ID NO: 5985 - protein, 14 aa, Homo sapiens
DGVPGLNIEELIEK

SEQ ID NO: 5986 - protein, 8 aa, Homo sapiens
LQDLLETK

SEQ ID NO: 5987 - protein, 17 aa, Homo sapiens
EIFEDVIDAANCSSADR

SEQ ID NO: 5988 - protein, 14 aa, Homo sapiens
LITPLAFALTSDNR

SEQ ID NO: 5989 - protein, 10 aa, Homo sapiens
MFILSDGEGK

SEQ ID NO: 5990 - protein, 16 aa, Homo sapiens
EDSHPFDLGLYNEAVK

SEQ ID NO: 5991 - protein, 19 aa, Homo sapiens
INAGMLAQFIDKPVCFVGR

SEQ ID NO: 5992 - protein, 12 aa, Homo sapiens
ATILCTSYVQFK

SEQ ID NO: 5993 - protein, 17 aa, Homo sapiens
IIHDFPQFYPLGIVQHD

SEQ ID NO: 5994 - protein, 8 aa, Homo sapiens
VDMMDLPR

SEQ ID NO: 5995 - protein, 7 aa, Homo sapiens
AHLTFPK

SEQ ID NO: 5996 - protein, 12 aa, Homo sapiens
FITEIWHPNVDK

SEQ ID NO: 5997 - protein, 25 aa, Homo sapiens
QLAELNKNPVEGFSAGLIDDNDLYR

SEQ ID NO: 5998 - protein, 9 aa, Homo sapiens
YGYEKPEER

SEQ ID NO: 5999 - protein, 11 aa, Homo sapiens
MTELQSALLLR

SEQ ID NO: 6000 - protein, 18 aa, Homo sapiens
NPVEGFSAGLIDDNDLYR

SEQ ID NO: 6001 - protein, 10 aa, Homo sapiens
TELQSALLLR

SEQ ID NO: 6002 - protein, 22 aa, Homo sapiens
QWLIDQIDSGKYPGLVWENEEK

SEQ ID NO: 6003 - protein, 11 aa, Homo sapiens
QWLIDQIDSGK

SEQ ID NO: 6004 - protein, 10 aa, Homo sapiens
SQLDISDPYK

SEQ ID NO: 6005 - protein, 19 aa, Homo sapiens
IYWDGPLALCNDRPNKLER

SEQ ID NO: 6006 - protein, 13 aa, Homo sapiens
KLITAHVEPLLAR

SEQ ID NO: 6007 - protein, 14 aa, Homo sapiens
GVVLWMAPDGLYAK

SEQ ID NO: 6008 - protein, 13 aa, Homo sapiens
QDYNREEDAALFK

SEQ ID NO: 6009 - protein, 16 aa, Homo sapiens
IYWDGPLALCNDRPNK

SEQ ID NO: 6010 - protein, 11 aa, Homo sapiens
YPGLVWENEEK

SEQ ID NO: 6011 - protein, 22 aa, Homo sapiens
DYVPDQPHPEIPYQCPMTFGPR

SEQ ID NO: 6012 - protein, 11 aa, Homo sapiens
ELTTSSPEGCR

SEQ ID NO: 6013 - protein, 16 aa, Homo sapiens
GYDLPEHISNPEDYHR

SEQ ID NO: 6014 - protein, 19 aa, Homo sapiens
LFDTQQFLSELQAFAHHGR

SEQ ID NO: 6015 - protein, 12 aa, Homo sapiens
LITAHVEPLLAR

SEQ ID NO: 6016 - protein, 7 aa, Homo sapiens
LLSHLER

SEQ ID NO: 6017 - protein, 15 aa, Homo sapiens
QLYYFAQQNSGHFLR

SEQ ID NO: 6018 - protein, 11 aa, Homo sapiens
SAEALAFSDCR

SEQ ID NO: 6019 - protein, 10 aa, Homo sapiens
SNDFEELVER

SEQ ID NO: 6020 - protein, 8 aa, Homo sapiens
MLPLIWSK

SEQ ID NO: 6021 - protein, 16 aa, Homo sapiens
LSDESIFSAFLSVVGK

SEQ ID NO: 6022 - protein, 9 aa, Homo sapiens
AIIDEFEQK

SEQ ID NO: 6023 - protein, 8 aa, Homo sapiens
LLFTMLEK

SEQ ID NO: 6024 - protein, 16 aa, Homo sapiens
SGGVNQYVVQEVLSIK

SEQ ID NO: 6025 - protein, 14 aa, Homo sapiens
ESTGNMVTGQTVCK

SEQ ID NO: 6026 - protein, 12 aa, Homo sapiens
QTLAAFVPLLLK

SEQ ID NO: 6027 - protein, 22 aa, Homo sapiens
TAAASAVLDPEEEWEAMLPELK

SEQ ID NO: 6028 - protein, 11 aa, Homo sapiens
KITEAIGIISK

SEQ ID NO: 6029 - protein, 30 aa, Homo sapiens
STLQQLLQLPQGEEEIPEQIANTETTEDVK

SEQ ID NO: 6030 - protein, 23 aa, Homo sapiens
VCNNPGLYSNPDLSAAASLALGK

SEQ ID NO: 6031 - protein, 30 aa, Homo sapiens
EKNTSSETTMEEELGLVGATADDTEAELIR

SEQ ID NO: 6032 - protein, 9 aa, Homo sapiens
NFFNELSHK

SEQ ID NO: 6033 - protein, 18 aa, Homo sapiens
LSDPELGVEEEPFHTIMK

SEQ ID NO: 6034 - protein, 11 aa, Homo sapiens
LLENPTINHQK

SEQ ID NO: 6035 - protein, 14 aa, Homo sapiens
DLAYCVSQLPLTER

SEQ ID NO: 6036 - protein, 19 aa, Homo sapiens
DQFLDTLQAHGHDVNSFVR

SEQ ID NO: 6037 - protein, 13 aa, Homo sapiens
EAITHLLGVALTR

SEQ ID NO: 6038 - protein, 24 aa, Homo sapiens
EATGHFQESEPFSHIDPEESEETR

SEQ ID NO: 6039 - protein, 8 aa, Homo sapiens
EAVLNAYR

SEQ ID NO: 6040 - protein, 11 aa, Homo sapiens
ELEIGQAGSQR

SEQ ID NO: 6041 - protein, 15 aa, Homo sapiens
FPNLVDPWTPHLYAR

SEQ ID NO: 6042 - protein, 12 aa, Homo sapiens
GFAAFLTELAER

SEQ ID NO: 6043 - protein, 14 aa, Homo sapiens
GNAIYNLLPDIISR

SEQ ID NO: 6044 - protein, 19 aa, Homo sapiens
HSQELPAILDDTTLSGSDR

SEQ ID NO: 6045 - protein, 9 aa, Homo sapiens
LRDPAQQVR

SEQ ID NO: 6046 - protein, 8 aa, Homo sapiens
MNCYALIR

SEQ ID NO: 6047 - protein, 16 aa, Homo sapiens
QEMLVQYLQDAYSFSR

SEQ ID NO: 6048 - protein, 8 aa, Homo sapiens
SIVGEIVR

SEQ ID NO: 6049 - protein, 13 aa, Homo sapiens
SNLMVATGDLAIR

SEQ ID NO: 6050 - protein, 7 aa, Homo sapiens
SPLPIVR

SEQ ID NO: 6051 - protein, 7 aa, Homo sapiens
VLQLFTR

SEQ ID NO: 6052 - protein, 19 aa, Homo sapiens
YQPLASTASDNDFVTPEPR

SEQ ID NO: 6053 - protein, 13 aa, Homo sapiens
AHPLGDEGGTASK

SEQ ID NO: 6054 - protein, 16 aa, Homo sapiens
AAAYSAQVQPVDGATR

SEQ ID NO: 6055 - protein, 23 aa, Homo sapiens
AALGHLAGEAAAAPGPGTPCASR

SEQ ID NO: 6056 - protein, 8 aa, Homo sapiens
AQMEAEWR

SEQ ID NO: 6057 - protein, 11 aa, Homo sapiens
ATLDMPDEEFR

SEQ ID NO: 6058 - protein, 12 aa, Homo sapiens
DEWLRPEDLPIK

SEQ ID NO: 6059 - protein, 12 aa, Homo sapiens
FKDPGLVDQLVK

SEQ ID NO: 6060 - protein, 30 aa, Homo sapiens
KKEPVGDDESVPENVLSFDDLTADALANLK

SEQ ID NO: 6061 - protein, 15 aa, Homo sapiens
KLDLEAWFPGSGAFR

SEQ ID NO: 6062 - protein, 13 aa, Homo sapiens
TICAILENYQTEK

SEQ ID NO: 6063 - protein, 13 aa, Homo sapiens
IEQFVYSSPHDNK

SEQ ID NO: 6064 - protein, 24 aa, Homo sapiens
EIGNLLHPSVPISNDEDVDNKVER

SEQ ID NO: 6065 - protein, 9 aa, Homo sapiens
LLIDEAILK

SEQ ID NO: 6066 - protein, 29 aa, Homo sapiens
KEPVGDDESVPENVLSFDDLTADALANLK

SEQ ID NO: 6067 - protein, 18 aa, Homo sapiens
EVMQEVAQLSQFDEELYK

SEQ ID NO: 6068 - protein, 7 aa, Homo sapiens
DVTLENR

SEQ ID NO: 6069 - protein, 14 aa, Homo sapiens
ELVSCSNCTDYQAR

SEQ ID NO: 6070 - protein, 8 aa, Homo sapiens
GGDPALIR

SEQ ID NO: 6071 - protein, 12 aa, Homo sapiens
GYIPIYTPFFMR

SEQ ID NO: 6072 - protein, 8 aa, Homo sapiens
IWGDCTVR

SEQ ID NO: 6073 - protein, 9 aa, Homo sapiens
YAGLSTCFR

SEQ ID NO: 6074 - protein, 15 aa, Homo sapiens
YLIATSEQPIAALHR

SEQ ID NO: 6075 - protein, 14 aa, Homo sapiens
FPGINYPVLTPNLK

SEQ ID NO: 6076 - protein, 14 aa, Homo sapiens
GYVSCALGCPYEGK

SEQ ID NO: 6077 - protein, 13 aa, Homo sapiens
WVPQMGDHTEVLK

SEQ ID NO: 6078 - protein, 10 aa, Homo sapiens
AAQSANISVR

SEQ ID NO: 6079 - protein, 7 aa, Homo sapiens
IVEVGPR

SEQ ID NO: 6080 - protein, 14 aa, Homo sapiens
LLEAGNFICQALNR

SEQ ID NO: 6081 - protein, 12 aa, Homo sapiens
NINCSIEESFQR

SEQ ID NO: 6082 - protein, 10 aa, Homo sapiens
PEINTNHLDK

SEQ ID NO: 6083 - protein, 10 aa, Homo sapiens
NCHLNENIEK

SEQ ID NO: 6084 - protein, 9 aa, Homo sapiens
IIAATFLFK

SEQ ID NO: 6085 - protein, 22 aa, Homo sapiens
LKAELGIPLEEVPPEEINYLTR

SEQ ID NO: 6086 - protein, 13 aa, Homo sapiens
KNVTLNPDPNEIK

SEQ ID NO: 6087 - protein, 12 aa, Homo sapiens
AFSVFLFNTENK

SEQ ID NO: 6088 - protein, 12 aa, Homo sapiens
NVTLNPDPNEIK

SEQ ID NO: 6089 - protein, 20 aa, Homo sapiens
AELGIPLEEVPPEEINYLTR

SEQ ID NO: 6090 - protein, 19 aa, Homo sapiens
AQSDGIWGEHEIDYILLVR

SEQ ID NO: 6091 - protein, 31 aa, Homo sapiens
ITFPGCFTNTCCSHPLSNPAELEESDALGVR

SEQ ID NO: 6092 - protein, 11 aa, Homo sapiens
KNCHLNENIEK

SEQ ID NO: 6093 - protein, 8 aa, Homo sapiens
EAAQWLHK

SEQ ID NO: 6094 - protein, 11 aa, Homo sapiens
NPSLLGILYGK

SEQ ID NO: 6095 - protein, 10 aa, Homo sapiens
DALQEIYNQK

SEQ ID NO: 6096 - protein, 14 aa, Homo sapiens
WLGLEEACQLAQFK

SEQ ID NO: 6097 - protein, 10 aa, Homo sapiens
TVIYWLAEVK

SEQ ID NO: 6098 - protein, 20 aa, Homo sapiens
ETQEEAGIEAGQLTIIEGFK

SEQ ID NO: 6099 - protein, 8 aa, Homo sapiens
ACGLIIFR

SEQ ID NO: 6100 - protein, 7 aa, Homo sapiens
DYDVEIR

SEQ ID NO: 6101 - protein, 15 aa, Homo sapiens
GHVEPGEDDLETALR

SEQ ID NO: 6102 - protein, 9 aa, Homo sapiens
LSHEHQAYR

SEQ ID NO: 6103 - protein, 15 aa, Homo sapiens
AASLEAVSYAIDTLK

SEQ ID NO: 6104 - protein, 33 aa, Homo sapiens
AAQYQVNQAAAAQAAATAAAMGIPQAVLPPLPK

SEQ ID NO: 6105 - protein, 17 aa, Homo sapiens
NHQDVAGVFALSSFLNK

SEQ ID NO: 6106 - protein, 7 aa, Homo sapiens
TELDILK

SEQ ID NO: 6107 - protein, 10 aa, Homo sapiens
ASAVYQALQK

SEQ ID NO: 6108 - protein, 13 aa, Homo sapiens
FHSFPNVYHELSK

SEQ ID NO: 6109 - protein, 10 aa, Homo sapiens
AAASGSVLQR

SEQ ID NO: 6110 - protein, 10 aa, Homo sapiens
GGISNVWFDR

SEQ ID NO: 6111 - protein, 19 aa, Homo sapiens
HSASLIFLHGSGDSGQGLR

SEQ ID NO: 6112 - protein, 9 aa, Homo sapiens
IIYPTAPPR

SEQ ID NO: 6113 - protein, 14 aa, Homo sapiens
DVYAQFLEMTDDKL

SEQ ID NO: 6114 - protein, 14 aa, Homo sapiens
IFDTSSGHLIQELR

SEQ ID NO: 6115 - protein, 8 aa, Homo sapiens
FHDIDDVK

SEQ ID NO: 6116 - protein, 26 aa, Homo sapiens
SLVESVSSSPNKESNEEEQVWHFLGK

SEQ ID NO: 6117 - protein, 21 aa, Homo sapiens
GYIWNYGTLPQTWEDPHEKDK

SEQ ID NO: 6118 - protein, 12 aa, Homo sapiens
SLVESVSSSPNK

SEQ ID NO: 6119 - protein, 17 aa, Homo sapiens
VPDGKPENQFAFNGEFK

SEQ ID NO: 6120 - protein, 14 aa, Homo sapiens
FKPGYLEATLNWFR

SEQ ID NO: 6121 - protein, 11 aa, Homo sapiens
ILSCGEVIHVK

SEQ ID NO: 6122 - protein, 9 aa, Homo sapiens
FHDIDDVKK

SEQ ID NO: 6123 - protein, 19 aa, Homo sapiens
GYIWNYGTLPQTWEDPHEK

SEQ ID NO: 6124 - protein, 8 aa, Homo sapiens
AFALEVIK

SEQ ID NO: 6125 - protein, 19 aa, Homo sapiens
STNCFGDNDPIDVCEIGSK

SEQ ID NO: 6126 - protein, 14 aa, Homo sapiens
ESNEEEQVWHFLGK

SEQ ID NO: 6127 - protein, 13 aa, Homo sapiens
LIAINANDPEASK

SEQ ID NO: 6128 - protein, 16 aa, Homo sapiens
NVTGHYISPFHDIPLK

SEQ ID NO: 6129 - protein, 18 aa, Homo sapiens
ARNDEYENLFNMIVEIPR

SEQ ID NO: 6130 - protein, 9 aa, Homo sapiens
GQPCSQNYR

SEQ ID NO: 6131 - protein, 16 aa, Homo sapiens
NDEYENLFNMIVEIPR

SEQ ID NO: 6132 - protein, 19 aa, Homo sapiens
AAAMDVDTPSGTNSGAGKK

SEQ ID NO: 6133 - protein, 18 aa, Homo sapiens
AAAMDVDTPSGTNSGAGK

SEQ ID NO: 6134 - protein, 7 aa, Homo sapiens
MQSFGMK

SEQ ID NO: 6135 - protein, 14 aa, Homo sapiens
CGEEIAVQFVDMVK

SEQ ID NO: 6136 - protein, 10 aa, Homo sapiens
QADVNLVNAK

SEQ ID NO: 6137 - protein, 13 aa, Homo sapiens
KILQDGGLQVVEK

SEQ ID NO: 6138 - protein, 11 aa, Homo sapiens
VTADVINAAEK

SEQ ID NO: 6139 - protein, 16 aa, Homo sapiens
NAGNCLSPAVIVGLLK

SEQ ID NO: 6140 - protein, 7 aa, Homo sapiens
AWAGSPK

SEQ ID NO: 6141 - protein, 13 aa, Homo sapiens
GTIQVITQGTSLK

SEQ ID NO: 6142 - protein, 12 aa, Homo sapiens
ILQDGGLQVVEK

SEQ ID NO: 6143 - protein, 10 aa, Homo sapiens
QIPQATASMK

SEQ ID NO: 6144 - protein, 9 aa, Homo sapiens
FMGTELNGK

SEQ ID NO: 6145 - protein, 19 aa, Homo sapiens
ALVDHENVISCPHLGASTK

SEQ ID NO: 6146 - protein, 13 aa, Homo sapiens
KVLISDSLDPCCR

SEQ ID NO: 6147 - protein, 15 aa, Homo sapiens
AGTGVDNVDLEAATR

SEQ ID NO: 6148 - protein, 21 aa, Homo sapiens
ALQSGQCAGAALDVFTEEPPR

SEQ ID NO: 6149 - protein, 23 aa, Homo sapiens
ALQSGQCAGAALDVFTEEPPRDR

SEQ ID NO: 6150 - protein, 8 aa, Homo sapiens
DLPLLLFR

SEQ ID NO: 6151 - protein, 16 aa, Homo sapiens
EELIAELQDCEGLIVR

SEQ ID NO: 6152 - protein, 11 aa, Homo sapiens
GGIVDEGALLR

SEQ ID NO: 6153 - protein, 11 aa, Homo sapiens
QHVTEAFQFHF

SEQ ID NO: 6154 - protein, 9 aa, Homo sapiens
TLGILGLGR

SEQ ID NO: 6155 - protein, 22 aa, Homo sapiens
TQTSDPAMLPTMIGLLAEAGVR

SEQ ID NO: 6156 - protein, 12 aa, Homo sapiens
VLISDSLDPCCR

SEQ ID NO: 6157 - protein, 15 aa, Homo sapiens
VTLKPILDEICDSSK

SEQ ID NO: 6158 - protein, 11 aa, Homo sapiens
DKNDAVLPLVR

SEQ ID NO: 6159 - protein, 13 aa, Homo sapiens
TIQTLGSWGSLSK

SEQ ID NO: 6160 - protein, 14 aa, Homo sapiens
LVPFATAVAELDLK

SEQ ID NO: 6161 - protein, 9 aa, Homo sapiens
ETFMCEFFK

SEQ ID NO: 6162 - protein, 12 aa, Homo sapiens
ESSGTSEPVHLK

SEQ ID NO: 6163 - protein, 18 aa, Homo sapiens
ETWFSLQPVDSNSEVQGK

SEQ ID NO: 6164 - protein, 15 aa, Homo sapiens
DCFCTINLDQEEVYR

SEQ ID NO: 6165 - protein, 20 aa, Homo sapiens
SPDVQPISASAAYILSEICR

SEQ ID NO: 6166 - protein, 17 aa, Homo sapiens
SSMSCPTVMCDIFYSLR

SEQ ID NO: 6167 - protein, 12 aa, Homo sapiens
EIIEQGIDLFNK

SEQ ID NO: 6168 - protein, 13 aa, Homo sapiens
ATLTQMLNVIFAR

SEQ ID NO: 6169 - protein, 27 aa, Homo sapiens
GIQYLQEQGMLGTTPEDIAQFLHQEER

SEQ ID NO: 6170 - protein, 28 aa, Homo sapiens
RGIQYLQEQGMLGTTPEDIAQFLHQEER

SEQ ID NO: 6171 - protein, 11 aa, Homo sapiens
SVDIHDSIQPR

SEQ ID NO: 6172 - protein, 15 aa, Homo sapiens
QILEDAAALIIHHVK

SEQ ID NO: 6173 - protein, 14 aa, Homo sapiens
LKVEDALSYLDQVK

SEQ ID NO: 6174 - protein, 11 aa, Homo sapiens
RHPTGTTPPVK

SEQ ID NO: 6175 - protein, 12 aa, Homo sapiens
KNPSIAVPIVLK

SEQ ID NO: 6176 - protein, 18 aa, Homo sapiens
LQFGSQPQVYNDFLDIMK

SEQ ID NO: 6177 - protein, 21 aa, Homo sapiens
LKEPMDVDVEDYYPAFLDMVR

SEQ ID NO: 6178 - protein, 13 aa, Homo sapiens
AELVQLVSPFLGK

SEQ ID NO: 6179 - protein, 12 aa, Homo sapiens
HGGGTESLFFDK

SEQ ID NO: 6180 - protein, 11 aa, Homo sapiens
DKSDSPAIQLR

SEQ ID NO: 6181 - protein, 15 aa, Homo sapiens
RLDDQESPVYAAQQR

SEQ ID NO: 6182 - protein, 10 aa, Homo sapiens
SAEAYENFLR

SEQ ID NO: 6183 - protein, 17 aa, Homo sapiens
SLLDGNIDSSQYEDSLR

SEQ ID NO: 6184 - protein, 9 aa, Homo sapiens
SLLESTYQR

SEQ ID NO: 6185 - protein, 12 aa, Homo sapiens
SQSIDTPGVISR

SEQ ID NO: 6186 - protein, 8 aa, Homo sapiens
AVLLLQEK

SEQ ID NO: 6187 - protein, 13 aa, Homo sapiens
IPDYLWMGLDGMK

SEQ ID NO: 6188 - protein, 12 aa, Homo sapiens
NPDGGFATYETK

SEQ ID NO: 6189 - protein, 9 aa, Homo sapiens
SISIGPISK

SEQ ID NO: 6190 - protein, 13 aa, Homo sapiens
LSQVPDNPPDYQK

SEQ ID NO: 6191 - protein, 15 aa, Homo sapiens
EQTGLEAYALGLDTK

SEQ ID NO: 6192 - protein, 18 aa, Homo sapiens
QLPNGDWPQENIAGVFNK

SEQ ID NO: 6193 - protein, 10 aa, Homo sapiens
DGTACAEVSR

SEQ ID NO: 6194 - protein, 8 aa, Homo sapiens
FSQLYPER

SEQ ID NO: 6195 - protein, 9 aa, Homo sapiens
HPDIEAQER

SEQ ID NO: 6196 - protein, 13 aa, Homo sapiens
ILGVGPDDPDLVR

SEQ ID NO: 6197 - protein, 8 aa, Homo sapiens
IPLPAGYR

SEQ ID NO: 6198 - protein, 13 aa, Homo sapiens
IPLPAGYREEIVR

SEQ ID NO: 6199 - protein, 12 aa, Homo sapiens
LCDAVAVLLNMR

SEQ ID NO: 6200 - protein, 13 aa, Homo sapiens
LSAAEDPLVQSLR

SEQ ID NO: 6201 - protein, 10 aa, Homo sapiens
NIFPIWALGR

SEQ ID NO: 6202 - protein, 17 aa, Homo sapiens
NNVAPDELYTPHSWLLR

SEQ ID NO: 6203 - protein, 14 aa, Homo sapiens
STVFGTALNYVSLR

SEQ ID NO: 6204 - protein, 7 aa, Homo sapiens
TINMLVR

SEQ ID NO: 6205 - protein, 18 aa, Homo sapiens
VVYALLNLYEHHHSAHLR

SEQ ID NO: 6206 - protein, 17 aa, Homo sapiens
WYVDGPASTAFQEHVSR

SEQ ID NO: 6207 - protein, 9 aa, Homo sapiens
HELAEIVFK

SEQ ID NO: 6208 - protein, 29 aa, Homo sapiens
VIDPVTGKPCAGTTYLESPLSSETTQLSK

SEQ ID NO: 6209 - protein, 9 aa, Homo sapiens
LVLDPYLLK

SEQ ID NO: 6210 - protein, 20 aa, Homo sapiens
TYFAHDALQQCTVGDIVLLR

SEQ ID NO: 6211 - protein, 15 aa, Homo sapiens
DKPVTGEQIEVFANK

SEQ ID NO: 6212 - protein, 12 aa, Homo sapiens
SLPEYLENMVIK

SEQ ID NO: 6213 - protein, 7 aa, Homo sapiens
IQLFLAR

SEQ ID NO: 6214 - protein, 12 aa, Homo sapiens
LMDLQLSDSNFR

SEQ ID NO: 6215 - protein, 18 aa, Homo sapiens
SGLSDLAESLTNDNETNS

SEQ ID NO: 6216 - protein, 13 aa, Homo sapiens
SPTPPLFSLPEAR

SEQ ID NO: 6217 - protein, 12 aa, Homo sapiens
SVMLYAAEMIPK

SEQ ID NO: 6218 - protein, 25 aa, Homo sapiens
AVENPTATEIQDVCSAVGLNVFLEK

SEQ ID NO: 6219 - protein, 16 aa, Homo sapiens
TGGADQSLQQGEGSKK

SEQ ID NO: 6220 - protein, 12 aa, Homo sapiens
FICIYPAYLNNK

SEQ ID NO: 6221 - protein, 15 aa, Homo sapiens
TGGADQSLQQGEGSK

SEQ ID NO: 6222 - protein, 13 aa, Homo sapiens
KSVMLYAAEMIPK

SEQ ID NO: 6223 - protein, 14 aa, Homo sapiens
QEDGSLCLVQFPSR

SEQ ID NO: 6224 - protein, 10 aa, Homo sapiens
CSGNWMWAAK

SEQ ID NO: 6225 - protein, 25 aa, Homo sapiens
APGSLVISAYAVCPDITATVTPDLK

SEQ ID NO: 6226 - protein, 11 aa, Homo sapiens
EAPEPGMEVVK

SEQ ID NO: 6227 - protein, 22 aa, Homo sapiens
EWIKPIMFSGGIGSMEADHISK

SEQ ID NO: 6228 - protein, 11 aa, Homo sapiens
FCDNSSAIQGK

SEQ ID NO: 6229 - protein, 7 aa, Homo sapiens
KEFFLQR

SEQ ID NO: 6230 - protein, 23 aa, Homo sapiens
LVHSLFESIMSTQESSNPNNVLK

SEQ ID NO: 6231 - protein, 22 aa, Homo sapiens
KPPMLQPLALPPGLSVHQALER

SEQ ID NO: 6232 - protein, 10 aa, Homo sapiens
AFSITQGLLK

SEQ ID NO: 6233 - protein, 13 aa, Homo sapiens
MGPSYCLPPTFPK

SEQ ID NO: 6234 - protein, 12 aa, Homo sapiens
ALWEETSFQLDR

SEQ ID NO: 6235 - protein, 13 aa, Homo sapiens
CPACFVGTITGDR

SEQ ID NO: 6236 - protein, 22 aa, Homo sapiens
DAGLHCLELGHTGEAGPHAMVR

SEQ ID NO: 6237 - protein, 9 aa, Homo sapiens
DFLTHVSAR

SEQ ID NO: 6238 - protein, 8 aa, Homo sapiens
DSLSMAAR

SEQ ID NO: 6239 - protein, 14 aa, Homo sapiens
ELSDPAGAIIYTSR

SEQ ID NO: 6240 - protein, 18 aa, Homo sapiens
ESWLLPGSNDLLLEVGPR

SEQ ID NO: 6241 - protein, 11 aa, Homo sapiens
FGEPVLAGFAR

SEQ ID NO: 6242 - protein, 12 aa, Homo sapiens
FLRPEDPTRPSR

SEQ ID NO: 6243 - protein, 8 aa, Homo sapiens
FQQQQGLR

SEQ ID NO: 6244 - protein, 14 aa, Homo sapiens
GHLLYVALSPGQHR

SEQ ID NO: 6245 - protein, 11 aa, Homo sapiens
GWAAAVTFHPR

SEQ ID NO: 6246 - protein, 10 aa, Homo sapiens
HLAVMPHPER

SEQ ID NO: 6247 - protein, 9 aa, Homo sapiens
IRDVQCTGR

SEQ ID NO: 6248 - protein, 7 aa, Homo sapiens
IVLVDDR

SEQ ID NO: 6249 - protein, 12 aa, Homo sapiens
IVLVDDRECPVR

SEQ ID NO: 6250 - protein, 28 aa, Homo sapiens
LGGTALAQCFSQLGEHPPDLDLPENLVR

SEQ ID NO: 6251 - protein, 22 aa, Homo sapiens
LSFAHPPSAEVEAIALATLHDR

SEQ ID NO: 6252 - protein, 19 aa, Homo sapiens
NPSTVEAFDLAQSNSEHSR

SEQ ID NO: 6253 - protein, 7 aa, Homo sapiens
RFQELQR

SEQ ID NO: 6254 - protein, 7 aa, Homo sapiens
VGGPVYR

SEQ ID NO: 6255 - protein, 10 aa, Homo sapiens
VGPGPALMLR

SEQ ID NO: 6256 - protein, 8 aa, Homo sapiens
FAAVGFHK

SEQ ID NO: 6257 - protein, 10 aa, Homo sapiens
LMHGILTEQK

SEQ ID NO: 6258 - protein, 15 aa, Homo sapiens
TLTDELAALQITGVK

SEQ ID NO: 6259 - protein, 18 aa, Homo sapiens
NPSTSLGPTLEPEEVVNR

SEQ ID NO: 6260 - protein, 18 aa, Homo sapiens
SVTGEIVLITGAGHGIGR

SEQ ID NO: 6261 - protein, 11 aa, Homo sapiens
KEPVSTNAVQR

SEQ ID NO: 6262 - protein, 8 aa, Homo sapiens
FFVHSLHR

SEQ ID NO: 6263 - protein, 8 aa, Homo sapiens
MTLSPSYR

SEQ ID NO: 6264 - protein, 9 aa, Homo sapiens
YIPLHLHAR

SEQ ID NO: 6265 - protein, 9 aa, Homo sapiens
KRPSWFTQN

SEQ ID NO: 6266 - protein, 23 aa, Homo sapiens
APTIETVVLYTGETPSEQDQGKR

SEQ ID NO: 6267 - protein, 13 aa, Homo sapiens
NNIDVCPECGHLK

SEQ ID NO: 6268 - protein, 22 aa, Homo sapiens
APTIETVVLYTGETPSEQDQGK

SEQ ID NO: 6269 - protein, 23 aa, Homo sapiens
GVTEDDGRPIYALVNLATTSISK

SEQ ID NO: 6270 - protein, 10 aa, Homo sapiens
AILEMEQYIR

SEQ ID NO: 6271 - protein, 16 aa, Homo sapiens
WDTCAPEVILHAVGGK

SEQ ID NO: 6272 - protein, 12 aa, Homo sapiens
ASAYVFASPGCK

SEQ ID NO: 6273 - protein, 12 aa, Homo sapiens
VIAEGDLGIVEK

SEQ ID NO: 6274 - protein, 13 aa, Homo sapiens
RVIAEGDLGIVEK

SEQ ID NO: 6275 - protein, 11 aa, Homo sapiens
LVASAYSIAQK

SEQ ID NO: 6276 - protein, 8 aa, Homo sapiens
IIQLIEGK

SEQ ID NO: 6277 - protein, 13 aa, Homo sapiens
LTDIHGNVLQYHK

SEQ ID NO: 6278 - protein, 23 aa, Homo sapiens
AIAGVINQPYYNYEAGPDAVLGR

SEQ ID NO: 6279 - protein, 9 aa, Homo sapiens
ASSNTVLMR

SEQ ID NO: 6280 - protein, 7 aa, Homo sapiens
HIITTTR

SEQ ID NO: 6281 - protein, 12 aa, Homo sapiens
HMNSAGVLATLR

SEQ ID NO: 6282 - protein, 12 aa, Homo sapiens
LAQMSICSSLAR

SEQ ID NO: 6283 - protein, 16 aa, Homo sapiens
LVTDCVAAMNPDAVLR

SEQ ID NO: 6284 - protein, 8 aa, Homo sapiens
NYDYYASR

SEQ ID NO: 6285 - protein, 11 aa, Homo sapiens
QPCPSQYSAIK

SEQ ID NO: 6286 - protein, 9 aa, Homo sapiens
TCATDLQTK

SEQ ID NO: 6287 - protein, 23 aa, Homo sapiens
YAQDFGLVEEACFPYTGTDSPCK

SEQ ID NO: 6288 - protein, 22 aa, Homo sapiens
YYSSEYHYVGGFYGGCNEALMK

SEQ ID NO: 6289 - protein, 7 aa, Homo sapiens
MKEDCFR

SEQ ID NO: 6290 - protein, 20 aa, Homo sapiens
RGTDECAIESIAVAATPIPK

SEQ ID NO: 6291 - protein, 23 aa, Homo sapiens
LELVHHGPMAVAFEVYDDFLHYK

SEQ ID NO: 6292 - protein, 8 aa, Homo sapiens
KVVVYLQK

SEQ ID NO: 6293 - protein, 8 aa, Homo sapiens
NWACFTGK

SEQ ID NO: 6294 - protein, 11 aa, Homo sapiens
ILHLPTSWDWR

SEQ ID NO: 6295 - protein, 20 aa, Homo sapiens
NQASCGSCYSFASMGMLEAR

SEQ ID NO: 6296 - protein, 12 aa, Homo sapiens
NVHGINFVSPVR

SEQ ID NO: 6297 - protein, 17 aa, Homo sapiens
KLGNNCVFAPADVTSEK

SEQ ID NO: 6298 - protein, 27 aa, Homo sapiens
KLGNNCVFAPADVTSEKDVQTALALAK

SEQ ID NO: 6299 - protein, 26 aa, Homo sapiens
LGNNCVFAPADVTSEKDVQTALALAK

SEQ ID NO: 6300 - protein, 15 aa, Homo sapiens
VDVAVNCAGIAVASK

SEQ ID NO: 6301 - protein, 16 aa, Homo sapiens
LGNNCVFAPADVTSEK

SEQ ID NO: 6302 - protein, 23 aa, Homo sapiens
LVGQGASAVLLDLPNSGGEAQAK

SEQ ID NO: 6303 - protein, 12 aa, Homo sapiens
KGQTHTLEDFQR

SEQ ID NO: 6304 - protein, 25 aa, Homo sapiens
GVIINTASVAAFEGQVGQAAYSASK

SEQ ID NO: 6305 - protein, 10 aa, Homo sapiens
DVQTALALAK

SEQ ID NO: 6306 - protein, 20 aa, Homo sapiens
VMTIAPGLFGTPLLTSLPEK

SEQ ID NO: 6307 - protein, 8 aa, Homo sapiens
DLAPIGIR

SEQ ID NO: 6308 - protein, 12 aa, Homo sapiens
GGIVGMTLPIAR

SEQ ID NO: 6309 - protein, 20 aa, Homo sapiens
GLVAVITGGASGLGLATAER

SEQ ID NO: 6310 - protein, 11 aa, Homo sapiens
GQTHTLEDFQR

SEQ ID NO: 6311 - protein, 17 aa, Homo sapiens
LVAGEMGQNEPDQGGQR

SEQ ID NO: 6312 - protein, 14 aa, Homo sapiens
VCNFLASQVPFPSR

SEQ ID NO: 6313 - protein, 14 aa, Homo sapiens
VLDVNLMGTFNVIR

SEQ ID NO: 6314 - protein, 14 aa, Homo sapiens
GKIEEDSEVLMMIK

SEQ ID NO: 6315 - protein, 12 aa, Homo sapiens
IEEDSEVLMMIK

SEQ ID NO: 6316 - protein, 18 aa, Homo sapiens
LAACVNLIPQITSIYEWK

SEQ ID NO: 6317 - protein, 14 aa, Homo sapiens
TQSSLVPALTDFVR

SEQ ID NO: 6318 - protein, 10 aa, Homo sapiens
SYQQWVHTVK

SEQ ID NO: 6319 - protein, 7 aa, Homo sapiens
LGLKEVK

SEQ ID NO: 6320 - protein, 17 aa, Homo sapiens
ETLSQISDDLLIPGLGR

SEQ ID NO: 6321 - protein, 9 aa, Homo sapiens
FCFPFDVER

SEQ ID NO: 6322 - protein, 8 aa, Homo sapiens
TETPIVSK

SEQ ID NO: 6323 - protein, 19 aa, Homo sapiens
CVFELPAENDKPHDVEINK

SEQ ID NO: 6324 - protein, 20 aa, Homo sapiens
FMVQSMFAPTDTSDMEAVWK

SEQ ID NO: 6325 - protein, 14 aa, Homo sapiens
VEQVLSLEPQHELK

SEQ ID NO: 6326 - protein, 16 aa, Homo sapiens
TVQSNSPISALAPTGK

SEQ ID NO: 6327 - protein, 13 aa, Homo sapiens
SLSSSLDDTEVKK

SEQ ID NO: 6328 - protein, 14 aa, Homo sapiens
FRGPFTDVVTTNLK

SEQ ID NO: 6329 - protein, 9 aa, Homo sapiens
HINEVYYAK

SEQ ID NO: 6330 - protein, 18 aa, Homo sapiens
IVEVLGIPPAHILDQAPK

SEQ ID NO: 6331 - protein, 13 aa, Homo sapiens
DPDDQYKLTEDTR

SEQ ID NO: 6332 - protein, 25 aa, Homo sapiens
GFDPLLNLVLDGTIEYMRDPDDQYK

SEQ ID NO: 6333 - protein, 18 aa, Homo sapiens
GFDPLLNLVLDGTIEYMR

SEQ ID NO: 6334 - protein, 8 aa, Homo sapiens
QLGLVVCR

SEQ ID NO: 6335 - protein, 9 aa, Homo sapiens
SPSQPQAPK

SEQ ID NO: 6336 - protein, 18 aa, Homo sapiens
EDAENLLESQPLGSFLIR

SEQ ID NO: 6337 - protein, 8 aa, Homo sapiens
VRDVFEAK

SEQ ID NO: 6338 - protein, 16 aa, Homo sapiens
KYEQGFITDPVVLSPK

SEQ ID NO: 6339 - protein, 18 aa, Homo sapiens
KQLLCGAAIGTHEDDKYR

SEQ ID NO: 6340 - protein, 20 aa, Homo sapiens
DIDFLKEEEHDCFLEEIMTK

SEQ ID NO: 6341 - protein, 9 aa, Homo sapiens
AMMYSGELK

SEQ ID NO: 6342 - protein, 9 aa, Homo sapiens
YFSEADKIK

SEQ ID NO: 6343 - protein, 17 aa, Homo sapiens
QLLCGAAIGTHEDDKYR

SEQ ID NO: 6344 - protein, 10 aa, Homo sapiens
GMGSLDAMDK

SEQ ID NO: 6345 - protein, 20 aa, Homo sapiens
RFGVPVIADGGIQNVGHIAK

SEQ ID NO: 6346 - protein, 18 aa, Homo sapiens
GKLPIVNEDDELVAIIAR

SEQ ID NO: 6347 - protein, 15 aa, Homo sapiens
YEQGFITDPVVLSPK

SEQ ID NO: 6348 - protein, 20 aa, Homo sapiens
DKYPNLQVIGGNVVTAAQAK

SEQ ID NO: 6349 - protein, 13 aa, Homo sapiens
EDLVVAPAGITLK

SEQ ID NO: 6350 - protein, 7 aa, Homo sapiens
DYPLASK

SEQ ID NO: 6351 - protein, 8 aa, Homo sapiens
PQATAVYK

SEQ ID NO: 6352 - protein, 14 aa, Homo sapiens
REDLVVAPAGITLK

SEQ ID NO: 6353 - protein, 12 aa, Homo sapiens
VAQGVSGAVQDK

SEQ ID NO: 6354 - protein, 18 aa, Homo sapiens
TSSAQVEGGVHSLHSYEK

SEQ ID NO: 6355 - protein, 27 aa, Homo sapiens
VGMGSGSICITQEVLACGRPQATAVYK

SEQ ID NO: 6356 - protein, 19 aa, Homo sapiens
FGVPVIADGGIQNVGHIAK

SEQ ID NO: 6357 - protein, 19 aa, Homo sapiens
FVPYLIAGIQHSCQDIGAK

SEQ ID NO: 6358 - protein, 8 aa, Homo sapiens
EANEILQR

SEQ ID NO: 6359 - protein, 13 aa, Homo sapiens
HGFCGIPITDTGR

SEQ ID NO: 6360 - protein, 16 aa, Homo sapiens
LPIVNEDDELVAIIAR

SEQ ID NO: 6361 - protein, 8 aa, Homo sapiens
LVGIISSR

SEQ ID NO: 6362 - protein, 11 aa, Homo sapiens
NLIDAGVDALR

SEQ ID NO: 6363 - protein, 12 aa, Homo sapiens
KDLVDYITTHYK

SEQ ID NO: 6364 - protein, 11 aa, Homo sapiens
FHFGDSLCTHK

SEQ ID NO: 6365 - protein, 11 aa, Homo sapiens
SFGGGMNLSSK

SEQ ID NO: 6366 - protein, 11 aa, Homo sapiens
SPAIAAVGPIK

SEQ ID NO: 6367 - protein, 19 aa, Homo sapiens
IVLAAAGGVSHDELLDLAK

SEQ ID NO: 6368 - protein, 10 aa, Homo sapiens
TILGPTENIK

SEQ ID NO: 6369 - protein, 11 aa, Homo sapiens
DLVDYITTHYK

SEQ ID NO: 6370 - protein, 21 aa, Homo sapiens
AVEILADIIQNSTLGEAEIER

SEQ ID NO: 6371 - protein, 10 aa, Homo sapiens
IDAVNAETIR

SEQ ID NO: 6372 - protein, 9 aa, Homo sapiens
IPIPELEAR

SEQ ID NO: 6373 - protein, 12 aa, Homo sapiens
LCTSVTESEVAR

SEQ ID NO: 6374 - protein, 7 aa, Homo sapiens
QMLCYNR

SEQ ID NO: 6375 - protein, 10 aa, Homo sapiens
RIPIPELEAR

SEQ ID NO: 6376 - protein, 8 aa, Homo sapiens
SNMCWLRD

SEQ ID NO: 6377 - protein, 16 aa, Homo sapiens
STQAATQVVLNVPETR

SEQ ID NO: 6378 - protein, 19 aa, Homo sapiens
TNMLLQLDGSTPICEDIGR

SEQ ID NO: 6379 - protein, 22 aa, Homo sapiens
VASEDSGLSTCTVGLWIDAGSR

SEQ ID NO: 6380 - protein, 9 aa, Homo sapiens
VTCLESGLR

SEQ ID NO: 6381 - protein, 9 aa, Homo sapiens
MGGGDLNLK

SEQ ID NO: 6382 - protein, 7 aa, Homo sapiens
FLDDIKK

SEQ ID NO: 6383 - protein, 15 aa, Homo sapiens
AALLEAGMPECTEDK

SEQ ID NO: 6384 - protein, 12 aa, Homo sapiens
VCVSLLGTWIGK

SEQ ID NO: 6385 - protein, 18 aa, Homo sapiens
IFSSVQWLSGVKPVLSTK

SEQ ID NO: 6386 - protein, 18 aa, Homo sapiens
IEEPPIPPLEQPVAPEDK

SEQ ID NO: 6387 - protein, 9 aa, Homo sapiens
IEFQPPEAK

SEQ ID NO: 6388 - protein, 16 aa, Homo sapiens
EMALLATSLPEGIMVK

SEQ ID NO: 6389 - protein, 9 aa, Homo sapiens
MDLFSALIK

SEQ ID NO: 6390 - protein, 24 aa, Homo sapiens
NMTVEQLLTGSPTSPTVEPEKPTR

SEQ ID NO: 6391 - protein, 25 aa, Homo sapiens
SNDLFPVHHLDNNEFCPGDFVVDKR

SEQ ID NO: 6392 - protein, 21 aa, Homo sapiens
TLDNVAIVEEEKMEAVPDVER

SEQ ID NO: 6393 - protein, 13 aa, Homo sapiens
IESWLETHALLEK

SEQ ID NO: 6394 - protein, 9 aa, Homo sapiens
CYNEMALIR

SEQ ID NO: 6395 - protein, 10 aa, Homo sapiens
GLQEGYENSR

SEQ ID NO: 6396 - protein, 12 aa, Homo sapiens
IMSCSPDTQCSR

SEQ ID NO: 6397 - protein, 9 aa, Homo sapiens
LGCFDHAQR

SEQ ID NO: 6398 - protein, 29 aa, Homo sapiens
LRPSGDDVELIGEEEDVSVYDIADHPDFR

SEQ ID NO: 6399 - protein, 7 aa, Homo sapiens
TTDIVIR

SEQ ID NO: 6400 - protein, 21 aa, Homo sapiens
VQSCPDPAVYGVVQSGDHIGR

SEQ ID NO: 6401 - protein, 10 aa, Homo sapiens
VVQSMTQLVR

SEQ ID NO: 6402 - protein, 11 aa, Homo sapiens
ADQGEKENPMR

SEQ ID NO: 6403 - protein, 8 aa, Homo sapiens
GILGNAIK

SEQ ID NO: 6404 - protein, 8 aa, Homo sapiens
SMHEFSAK

SEQ ID NO: 6405 - protein, 19 aa, Homo sapiens
QEPGSNEEIKEFAAGYNVK

SEQ ID NO: 6406 - protein, 13 aa, Homo sapiens
DIDGHMVNLDKYR

SEQ ID NO: 6407 - protein, 11 aa, Homo sapiens
ILAFPCNQFGK

SEQ ID NO: 6408 - protein, 12 aa, Homo sapiens
YGPMEEPLVIEK

SEQ ID NO: 6409 - protein, 11 aa, Homo sapiens
DIDGHMVNLDK

SEQ ID NO: 6410 - protein, 10 aa, Homo sapiens
QEPGSNEEIK

SEQ ID NO: 6411 - protein, 13 aa, Homo sapiens
RYGPMEEPLVIEK

SEQ ID NO: 6412 - protein, 14 aa, Homo sapiens
TEVNYTQLVDLHAR

SEQ ID NO: 6413 - protein, 7 aa, Homo sapiens
YAECGLR

SEQ ID NO: 6414 - protein, 21 aa, Homo sapiens
MPFPVNHGASSEDTLLKDAAK

SEQ ID NO: 6415 - protein, 11 aa, Homo sapiens
PMEINPEMLNK

SEQ ID NO: 6416 - protein, 8 aa, Homo sapiens
FSAVALCK

SEQ ID NO: 6417 - protein, 32 aa, Homo sapiens
QTIGNSCGTIGLIHAVANNQDKLGFEDGSVLK

SEQ ID NO: 6418 - protein, 22 aa, Homo sapiens
CFEKNEAIQAAHDAVAQEGQCR

SEQ ID NO: 6419 - protein, 15 aa, Homo sapiens
MQLKPMEINPEMLNK

SEQ ID NO: 6420 - protein, 22 aa, Homo sapiens
QTIGNSCGTIGLIHAVANNQDK

SEQ ID NO: 6421 - protein, 7 aa, Homo sapiens
KQIEELK

SEQ ID NO: 6422 - protein, 17 aa, Homo sapiens
MPFPVNHGASSEDTLLK

SEQ ID NO: 6423 - protein, 13 aa, Homo sapiens
QIEELKGQEVSPK

SEQ ID NO: 6424 - protein, 25 aa, Homo sapiens
VDDKVNFHFILFNNVDGHLYELDGR

SEQ ID NO: 6425 - protein, 8 aa, Homo sapiens
QFLSETEK

SEQ ID NO: 6426 - protein, 14 aa, Homo sapiens
KQIEELKGQEVSPK

SEQ ID NO: 6427 - protein, 10 aa, Homo sapiens
LGFEDGSVLK

SEQ ID NO: 6428 - protein, 11 aa, Homo sapiens
EFTEREQGEVR

SEQ ID NO: 6429 - protein, 8 aa, Homo sapiens
LGVAGQWR

SEQ ID NO: 6430 - protein, 18 aa, Homo sapiens
NEAIQAAHDAVAQEGQCR

SEQ ID NO: 6431 - protein, 21 aa, Homo sapiens
VNFHFILFNNVDGHLYELDGR

SEQ ID NO: 6432 - protein, 8 aa, Homo sapiens
GVLNSPVK

SEQ ID NO: 6433 - protein, 8 aa, Homo sapiens
VGFVTYNK

SEQ ID NO: 6434 - protein, 18 aa, Homo sapiens
NCASPSSAGQLILPECMK

SEQ ID NO: 6435 - protein, 18 aa, Homo sapiens
ETETVFVPVIQAGMEALK

SEQ ID NO: 6436 - protein, 13 aa, Homo sapiens
NCETDTLINYMAK

SEQ ID NO: 6437 - protein, 15 aa, Homo sapiens
QAQVPLAAVIKPLAR

SEQ ID NO: 6438 - protein, 7 aa, Homo sapiens
LLCEELK

SEQ ID NO: 6439 - protein, 11 aa, Homo sapiens
LLPVYLNCVLK

SEQ ID NO: 6440 - protein, 16 aa, Homo sapiens
LFLFHTSLPIAEAPGK

SEQ ID NO: 6441 - protein, 14 aa, Homo sapiens
CTSYNIPCTSDMAK

SEQ ID NO: 6442 - protein, 14 aa, Homo sapiens
GQVPPLVTTNFLVK

SEQ ID NO: 6443 - protein, 15 aa, Homo sapiens
TLFQPQTGAYQTLAK

SEQ ID NO: 6444 - protein, 17 aa, Homo sapiens
SLSGGASYVDFLCHMHK

SEQ ID NO: 6445 - protein, 18 aa, Homo sapiens
AVITSLLDQIPEMFADTR

SEQ ID NO: 6446 - protein, 10 aa, Homo sapiens
GTEPFVTGVR

SEQ ID NO: 6447 - protein, 26 aa, Homo sapiens
HDDRLNEESGALLQCALLYTSCAGQR

SEQ ID NO: 6448 - protein, 17 aa, Homo sapiens
IHNLALNCCTQLADLYR

SEQ ID NO: 6449 - protein, 20 aa, Homo sapiens
LPPEEASPYVVDHGESGPLR

SEQ ID NO: 6450 - protein, 15 aa, Homo sapiens
SDVLQPGAEVTTDDR

SEQ ID NO: 6451 - protein, 8 aa, Homo sapiens
SLLDFLPR

SEQ ID NO: 6452 - protein, 13 aa, Homo sapiens
SPVESTTEPPAVR

SEQ ID NO: 6453 - protein, 9 aa, Homo sapiens
VVGFDAVMR

SEQ ID NO: 6454 - protein, 12 aa, Homo sapiens
YASFQVENDQER

SEQ ID NO: 6455 - protein, 14 aa, Homo sapiens
MFLENETWELCPVK

SEQ ID NO: 6456 - protein, 10 aa, Homo sapiens
KPIYWIVAGK

SEQ ID NO: 6457 - protein, 11 aa, Homo sapiens
AYYLTENDMER

SEQ ID NO: 6458 - protein, 15 aa, Homo sapiens
EGFTQASLGLLANQR

SEQ ID NO: 6459 - protein, 15 aa, Homo sapiens
IPLPVSNILWEHCIR

SEQ ID NO: 6460 - protein, 14 aa, Homo sapiens
LPPVLNLQELEAYR

SEQ ID NO: 6461 - protein, 9 aa, Homo sapiens
SEVLQESIR

SEQ ID NO: 6462 - protein, 16 aa, Homo sapiens
SPQESLSDLGAIESLR

SEQ ID NO: 6463 - protein, 19 aa, Homo sapiens
SLKDPNNSLTLWVIDQGLK

SEQ ID NO: 6464 - protein, 9 aa, Homo sapiens
NIGGQIQEK

SEQ ID NO: 6465 - protein, 11 aa, Homo sapiens
SWFEGQGLAGK

SEQ ID NO: 6466 - protein, 9 aa, Homo sapiens
DNALTLLIK

SEQ ID NO: 6467 - protein, 16 aa, Homo sapiens
DPNNSLTLWVIDQGLK

SEQ ID NO: 6468 - protein, 9 aa, Homo sapiens
MSASILLSK

SEQ ID NO: 6469 - protein, 13 aa, Homo sapiens
LEDYDKAETEASK

SEQ ID NO: 6470 - protein, 12 aa, Homo sapiens
LGSAGGTDFSMK

SEQ ID NO: 6471 - protein, 14 aa, Homo sapiens
VEQMFQILLDPEEK

SEQ ID NO: 6472 - protein, 10 aa, Homo sapiens
TASSVEQLRK

SEQ ID NO: 6473 - protein, 16 aa, Homo sapiens
ALIPLALEGTDVGQTK

SEQ ID NO: 6474 - protein, 13 aa, Homo sapiens
AATECMCNLAMSK

SEQ ID NO: 6475 - protein, 13 aa, Homo sapiens
AAAGGLAMLTSMR

SEQ ID NO: 6476 - protein, 19 aa, Homo sapiens
AAAGGLAMLTSMRPTLCSR

SEQ ID NO: 6477 - protein, 7 aa, Homo sapiens
ALFQLSR

SEQ ID NO: 6478 - protein, 29 aa, Homo sapiens
CGDYGGALAAYTQALGLDATPQDQAVLHR

SEQ ID NO: 6479 - protein, 13 aa, Homo sapiens
EVQDLFEAQGNDR

SEQ ID NO: 6480 - protein, 15 aa, Homo sapiens
LLDMGETDLMLAALR

SEQ ID NO: 6481 - protein, 15 aa, Homo sapiens
LLVLYSGEDDELLQR

SEQ ID NO: 6482 - protein, 15 aa, Homo sapiens
LTITSNPEMTFPGER

SEQ ID NO: 6483 - protein, 11 aa, Homo sapiens
TESPVLTSSCR

SEQ ID NO: 6484 - protein, 12 aa, Homo sapiens
TLVGICSEHQSR

SEQ ID NO: 6485 - protein, 11 aa, Homo sapiens
TVATLSILGTR

SEQ ID NO: 6486 - protein, 7 aa, Homo sapiens
VFQEALR

SEQ ID NO: 6487 - protein, 15 aa, Homo sapiens
AVSELELLGFIKPTK

SEQ ID NO: 6488 - protein, 18 aa, Homo sapiens
SEEGCIPNIAPDICIAYK

SEQ ID NO: 6489 - protein, 15 aa, Homo sapiens
IALHTALNNPYYYLK

SEQ ID NO: 6490 - protein, 8 aa, Homo sapiens
TDLYHLQK

SEQ ID NO: 6491 - protein, 11 aa, Homo sapiens
EAFCQLLQLMK

SEQ ID NO: 6492 - protein, 10 aa, Homo sapiens
VLSGLEILSK

SEQ ID NO: 6493 - protein, 21 aa, Homo sapiens
LLQQQNLPQTGEQELESLVLK

SEQ ID NO: 6494 - protein, 28 aa, Homo sapiens
NSFNNPAYYVLEGVPHQLLPPEPPSPAR

SEQ ID NO: 6495 - protein, 14 aa, Homo sapiens
SALLPGPLELQPPR

SEQ ID NO: 6496 - protein, 14 aa, Homo sapiens
TLSEVDYAPAGPAR

SEQ ID NO: 6497 - protein, 7 aa, Homo sapiens
IGLDFCK

SEQ ID NO: 6498 - protein, 12 aa, Homo sapiens
SFLLDLLNATGK

SEQ ID NO: 6499 - protein, 19 aa, Homo sapiens
WCDKSDEDDWSKPLPPSER

SEQ ID NO: 6500 - protein, 7 aa, Homo sapiens
HAIPIIK

SEQ ID NO: 6501 - protein, 17 aa, Homo sapiens
LEQELFSGGNTGINFEK

SEQ ID NO: 6502 - protein, 11 aa, Homo sapiens
DKDAYSSFGSR

SEQ ID NO: 6503 - protein, 24 aa, Homo sapiens
KGADSLEDFLYHEGYACTSIHGDR

SEQ ID NO: 6504 - protein, 12 aa, Homo sapiens
DLMACAQTGSGK

SEQ ID NO: 6505 - protein, 14 aa, Homo sapiens
GFYDKDSSGWSSSK

SEQ ID NO: 6506 - protein, 11 aa, Homo sapiens
HTMMFSATFPK

SEQ ID NO: 6507 - protein, 8 aa, Homo sapiens
GLDISNVK

SEQ ID NO: 6508 - protein, 13 aa, Homo sapiens
KQYPISLVLAPTR

SEQ ID NO: 6509 - protein, 9 aa, Homo sapiens
YTRPTPVQK

SEQ ID NO: 6510 - protein, 17 aa, Homo sapiens
QEVPSWLENMAYEHHYK

SEQ ID NO: 6511 - protein, 15 aa, Homo sapiens
SDEDDWSKPLPPSER

SEQ ID NO: 6512 - protein, 10 aa, Homo sapiens
DLLDLLVEAK

SEQ ID NO: 6513 - protein, 31 aa, Homo sapiens
HTMMFSATFPKEIQMLARDFLDEYIFLAVGR

SEQ ID NO: 6514 - protein, 10 aa, Homo sapiens
DREEALHQFR

SEQ ID NO: 6515 - protein, 7 aa, Homo sapiens
EIQMLAR

SEQ ID NO: 6516 - protein, 11 aa, Homo sapiens
ELAVQIYEEAR

SEQ ID NO: 6517 - protein, 8 aa, Homo sapiens
FSGGFGAR

SEQ ID NO: 6518 - protein, 23 aa, Homo sapiens
GADSLEDFLYHEGYACTSIHGDR

SEQ ID NO: 6519 - protein, 11 aa, Homo sapiens
GCHLLVATPGR

SEQ ID NO: 6520 - protein, 17 aa, Homo sapiens
HVINFDLPSDIEEYVHR

SEQ ID NO: 6521 - protein, 7 aa, Homo sapiens
LVDMMER

SEQ ID NO: 6522 - protein, 11 aa, Homo sapiens
MLDMGFEPQIR

SEQ ID NO: 6523 - protein, 12 aa, Homo sapiens
QYPISLVLAPTR

SEQ ID NO: 6524 - protein, 9 aa, Homo sapiens
SDYDGIGSR

SEQ ID NO: 6525 - protein, 12 aa, Homo sapiens
SPILVATAVAAR

SEQ ID NO: 6526 - protein, 7 aa, Homo sapiens
SSFFSDR

SEQ ID NO: 6527 - protein, 22 aa, Homo sapiens
TAAFLLPILSQIYSDGPGEALR

SEQ ID NO: 6528 - protein, 14 aa, Homo sapiens
VGNLGLATSFFNER

SEQ ID NO: 6529 - protein, 17 aa, Homo sapiens
VRPCVVYGGADIGQQIR

SEQ ID NO: 6530 - protein, 9 aa, Homo sapiens
NFVGPPHFK

SEQ ID NO: 6531 - protein, 11 aa, Homo sapiens
TVEVLEPEVTK

SEQ ID NO: 6532 - protein, 15 aa, Homo sapiens
DKPANVQPYYLYGSK

SEQ ID NO: 6533 - protein, 17 aa, Homo sapiens
HEYGSPGILEFFHHQLK

SEQ ID NO: 6534 - protein, 14 aa, Homo sapiens
YQILNNEVFAILNK

SEQ ID NO: 6535 - protein, 10 aa, Homo sapiens
LADQIFAYYK

SEQ ID NO: 6536 - protein, 11 aa, Homo sapiens
AMAGSVLLDKR

SEQ ID NO: 6537 - protein, 13 aa, Homo sapiens
DFVSEAYLLTLGK

SEQ ID NO: 6538 - protein, 16 aa, Homo sapiens
YSNSEVVTGSGLDSQK

SEQ ID NO: 6539 - protein, 10 aa, Homo sapiens
TMLESLIADK

SEQ ID NO: 6540 - protein, 13 aa, Homo sapiens
CNEQPNRVEIYEK

SEQ ID NO: 6541 - protein, 9 aa, Homo sapiens
DIIEYAELK

SEQ ID NO: 6542 - protein, 13 aa, Homo sapiens
AVGPSSTQLYMVR

SEQ ID NO: 6543 - protein, 14 aa, Homo sapiens
CFQPPIHQSLATTC

SEQ ID NO: 6544 - protein, 12 aa, Homo sapiens
EANHNVSAPYGR

SEQ ID NO: 6545 - protein, 12 aa, Homo sapiens
FINMFAVLDELK

SEQ ID NO: 6546 - protein, 7 aa, Homo sapiens
FISELAR

SEQ ID NO: 6547 - protein, 8 aa, Homo sapiens
GLQVLMGR

SEQ ID NO: 6548 - protein, 12 aa, Homo sapiens
HMTLDSFDAMFR

SEQ ID NO: 6549 - protein, 7 aa, Homo sapiens
HVQLLGR

SEQ ID NO: 6550 - protein, 11 aa, Homo sapiens
LGTPQQIAIAR

SEQ ID NO: 6551 - protein, 16 aa, Homo sapiens
LLGYQGIAVVMEELLK

SEQ ID NO: 6552 - protein, 22 aa, Homo sapiens
MADPQSIQESQNLSMFLANHNR

SEQ ID NO: 6553 - protein, 10 aa, Homo sapiens
MESVFNQAIR

SEQ ID NO: 6554 - protein, 9 aa, Homo sapiens
NAFVTGIAR

SEQ ID NO: 6555 - protein, 11 aa, Homo sapiens
NVLISVLQAIR

SEQ ID NO: 6556 - protein, 17 aa, Homo sapiens
QLQVVPLFGDMQIELAR

SEQ ID NO: 6557 - protein, 14 aa, Homo sapiens
SDEEYRELFDLALR

SEQ ID NO: 6558 - protein, 8 aa, Homo sapiens
SLDQAISR

SEQ ID NO: 6559 - protein, 13 aa, Homo sapiens
SVETDSSTVEHVR

SEQ ID NO: 6560 - protein, 9 aa, Homo sapiens
SYLQDPIWR

SEQ ID NO: 6561 - protein, 11 aa, Homo sapiens
TAIPFTQEPQR

SEQ ID NO: 6562 - protein, 8 aa, Homo sapiens
TDVFQSLR

SEQ ID NO: 6563 - protein, 12 aa, Homo sapiens
YAPLHLVPLIER

SEQ ID NO: 6564 - protein, 11 aa, Homo sapiens
ETWEEAALHLK

SEQ ID NO: 6565 - protein, 19 aa, Homo sapiens
KQEEQEPTGEEPAVLGGDK

SEQ ID NO: 6566 - protein, 8 aa, Homo sapiens
PWIPVLER

SEQ ID NO: 6567 - protein, 8 aa, Homo sapiens
ILILQGLK

SEQ ID NO: 6568 - protein, 9 aa, Homo sapiens
SHLFFTAGK

SEQ ID NO: 6569 - protein, 12 aa, Homo sapiens
LLAVSLLDCTVK

SEQ ID NO: 6570 - protein, 13 aa, Homo sapiens
SFDLIHSPHGELK

SEQ ID NO: 6571 - protein, 14 aa, Homo sapiens
DVIGFNMAGLDYLK

SEQ ID NO: 6572 - protein, 29 aa, Homo sapiens
EAEYEESVAKEDQPAVPGETQGDSYFTGK

SEQ ID NO: 6573 - protein, 19 aa, Homo sapiens
VWDIAYLQEIEDPEEPDPK

SEQ ID NO: 6574 - protein, 14 aa, Homo sapiens
YVASAVFGVIGSQK

SEQ ID NO: 6575 - protein, 11 aa, Homo sapiens
WWDLDTQHCFK

SEQ ID NO: 6576 - protein, 10 aa, Homo sapiens
DAITQALFLR

SEQ ID NO: 6577 - protein, 9 aa, Homo sapiens
IMEAIELYR

SEQ ID NO: 6578 - protein, 11 aa, Homo sapiens
LITGASDSELR

SEQ ID NO: 6579 - protein, 10 aa, Homo sapiens
SSFVPSLFSK

SEQ ID NO: 6580 - protein, 7 aa, Homo sapiens
TLLEKPK

SEQ ID NO: 6581 - protein, 14 aa, Homo sapiens
DRVPTYQYNMNFEK

SEQ ID NO: 6582 - protein, 14 aa, Homo sapiens
HFESQSDDPHFHEK

SEQ ID NO: 6583 - protein, 7 aa, Homo sapiens
DLTAHFR

SEQ ID NO: 6584 - protein, 23 aa, Homo sapiens
GTELDDGIQADSGPINDTDANPR

SEQ ID NO: 6585 - protein, 8 aa, Homo sapiens
LFFIQACR

SEQ ID NO: 6586 - protein, 15 aa, Homo sapiens
HYEGLSYNVDSLHQK

SEQ ID NO: 6587 - protein, 12 aa, Homo sapiens
EAVIAQISSHVK

SEQ ID NO: 6588 - protein, 15 aa, Homo sapiens
AIDTIYQTTDFSGIR

SEQ ID NO: 6589 - protein, 10 aa, Homo sapiens
AVSHEDQFLR

SEQ ID NO: 6590 - protein, 11 aa, Homo sapiens
GGTFYVEPAER

SEQ ID NO: 6591 - protein, 14 aa, Homo sapiens
TITLQPGSPCNDFR

SEQ ID NO: 6592 - protein, 26 aa, Homo sapiens
YQMTGVEEVTQIPQEEHAANGPELLR

SEQ ID NO: 6593 - protein, 17 aa, Homo sapiens
MLHNASLLIDDIEDNSK

SEQ ID NO: 6594 - protein, 12 aa, Homo sapiens
TPLYSQLLQAYK

SEQ ID NO: 6595 - protein, 19 aa, Homo sapiens
AQPTTLVLPPQYVDDVISR

SEQ ID NO: 6596 - protein, 8 aa, Homo sapiens
LFQAPCQR

SEQ ID NO: 6597 - protein, 21 aa, Homo sapiens
ILEDQEENPLPAALVQPHTGK

SEQ ID NO: 6598 - protein, 11 aa, Homo sapiens
TVIFVATGEGK

SEQ ID NO: 6599 - protein, 15 aa, Homo sapiens
IVAPISDSPKPPPQR

SEQ ID NO: 6600 - protein, 10 aa, Homo sapiens
IVAPISDSPK

SEQ ID NO: 6601 - protein, 28 aa, Homo sapiens
AAPAPGLISVFSSSQELGAALAQLVAQR

SEQ ID NO: 6602 - protein, 16 aa, Homo sapiens
ELPAAVAPAGPASLAR

SEQ ID NO: 6603 - protein, 11 aa, Homo sapiens
LCWFLDEAAAR

SEQ ID NO: 6604 - protein, 15 aa, Homo sapiens
LVPFDHAESTYGLYR

SEQ ID NO: 6605 - protein, 12 aa, Homo sapiens
VTLTLPVLNAAR

SEQ ID NO: 6606 - protein, 9 aa, Homo sapiens
WTLGFCDER

SEQ ID NO: 6607 - protein, 8 aa, Homo sapiens
TALLGLTK

SEQ ID NO: 6608 - protein, 13 aa, Homo sapiens
MLWMDKEKEESMK

SEQ ID NO: 6609 - protein, 13 aa, Homo sapiens
LAQDGAHVVVSSR

SEQ ID NO: 6610 - protein, 9 aa, Homo sapiens
TLAIELAPR

SEQ ID NO: 6611 - protein, 24 aa, Homo sapiens
ADQELMTYSHDNIICGITSVSFSK

SEQ ID NO: 6612 - protein, 23 aa, Homo sapiens
VSCLGVTDDGMAVATGSWDSFLK

SEQ ID NO: 6613 - protein, 11 aa, Homo sapiens
LIIWDSYTTNK

SEQ ID NO: 6614 - protein, 10 aa, Homo sapiens
LLVSASQDGK

SEQ ID NO: 6615 - protein, 14 aa, Homo sapiens
SELDQLRQEAEQLK

SEQ ID NO: 6616 - protein, 12 aa, Homo sapiens
LFVSGACDASAK

SEQ ID NO: 6617 - protein, 20 aa, Homo sapiens
KACADATLSQITNNIDPVGR

SEQ ID NO: 6618 - protein, 19 aa, Homo sapiens
ACADATLSQITNNIDPVGR

SEQ ID NO: 6619 - protein, 10 aa, Homo sapiens
AGVLAGHDNR

SEQ ID NO: 6620 - protein, 13 aa, Homo sapiens
ELAGHTGYLSCCR

SEQ ID NO: 6621 - protein, 11 aa, Homo sapiens
IYAMHWGTDSR

SEQ ID NO: 6622 - protein, 7 aa, Homo sapiens
SELDQLR

SEQ ID NO: 6623 - protein, 7 aa, Homo sapiens
VHAIPLR

SEQ ID NO: 6624 - protein, 8 aa, Homo sapiens
AMLSTGFK

SEQ ID NO: 6625 - protein, 23 aa, Homo sapiens
KVAEPELMGTPDGTCYPPPPVPR

SEQ ID NO: 6626 - protein, 9 aa, Homo sapiens
ILALDCGLK

SEQ ID NO: 6627 - protein, 10 aa, Homo sapiens
VHVDCMTSQK

SEQ ID NO: 6628 - protein, 10 aa, Homo sapiens
FLSSAAAVSK

SEQ ID NO: 6629 - protein, 16 aa, Homo sapiens
LFVEALGQIGPAPPLK

SEQ ID NO: 6630 - protein, 8 aa, Homo sapiens
EHPVVISK

SEQ ID NO: 6631 - protein, 8 aa, Homo sapiens
KEEILLIK

SEQ ID NO: 6632 - protein, 12 aa, Homo sapiens
HPQPGAVELAAK

SEQ ID NO: 6633 - protein, 21 aa, Homo sapiens
EELSALVAPAFAHTSQVLVDK

SEQ ID NO: 6634 - protein, 11 aa, Homo sapiens
KNILLTIGSYK

SEQ ID NO: 6635 - protein, 17 aa, Homo sapiens
LGGAVLSFSEATSSVQK

SEQ ID NO: 6636 - protein, 14 aa, Homo sapiens
LAADFSVPLIIDIK

SEQ ID NO: 6637 - protein, 9 aa, Homo sapiens
SILEQLAEK

SEQ ID NO: 6638 - protein, 20 aa, Homo sapiens
NSVTGGTAAFEPSVDYCVVK

SEQ ID NO: 6639 - protein, 22 aa, Homo sapiens
VIMGEEVEPVGLMTGSGVVGVK

SEQ ID NO: 6640 - protein, 10 aa, Homo sapiens
AHWTPFEGQK

SEQ ID NO: 6641 - protein, 13 aa, Homo sapiens
GQPLPPDLLQQAK

SEQ ID NO: 6642 - protein, 9 aa, Homo sapiens
PLVPEVSIK

SEQ ID NO: 6643 - protein, 28 aa, Homo sapiens
QDVEALWENMAVIDCFASDHAPHTLEEK

SEQ ID NO: 6644 - protein, 12 aa, Homo sapiens
ATGYPLAYVAAK

SEQ ID NO: 6645 - protein, 16 aa, Homo sapiens
AAFALGGLGSGFASNR

SEQ ID NO: 6646 - protein, 12 aa, Homo sapiens
AALVLEDGSVLR

SEQ ID NO: 6647 - protein, 14 aa, Homo sapiens
DQMSHLFNVAHTLR

SEQ ID NO: 6648 - protein, 13 aa, Homo sapiens
EATAGNPGGQTVR

SEQ ID NO: 6649 - protein, 9 aa, Homo sapiens
ELSDLESAR

SEQ ID NO: 6650 - protein, 21 aa, Homo sapiens
GESLADSVQTMSCYADVVVLR

SEQ ID NO: 6651 - protein, 21 aa, Homo sapiens
GEVAYIDGQVLVPPGYGQDVR

SEQ ID NO: 6652 - protein, 10 aa, Homo sapiens
GEVRPELGSR

SEQ ID NO: 6653 - protein, 13 aa, Homo sapiens
GHNQPCLLVGSGR

SEQ ID NO: 6654 - protein, 22 aa, Homo sapiens
GLPVTCEVAPHHLFLSHDDLER

SEQ ID NO: 6655 - protein, 12 aa, Homo sapiens
IIAHAQLLEQHR

SEQ ID NO: 6656 - protein, 11 aa, Homo sapiens
LALGIPLPELR

SEQ ID NO: 6657 - protein, 17 aa, Homo sapiens
LCPPGIPTPGSGLPPPR

SEQ ID NO: 6658 - protein, 8 aa, Homo sapiens
LGYPVLVR

SEQ ID NO: 6659 - protein, 13 aa, Homo sapiens
LLDTIGISQPQWR

SEQ ID NO: 6660 - protein, 9 aa, Homo sapiens
LSLDDLLQR

SEQ ID NO: 6661 - protein, 11 aa, Homo sapiens
LYLNETFSELR

SEQ ID NO: 6662 - protein, 26 aa, Homo sapiens
MAEIGEHVAPSEAANSLEQAQAAAER

SEQ ID NO: 6663 - protein, 10 aa, Homo sapiens
MALLATVLGR

SEQ ID NO: 6664 - protein, 9 aa, Homo sapiens
MVVMHPMPR

SEQ ID NO: 6665 - protein, 21 aa, Homo sapiens
PSYVLSGAAMNVAYTDGDLER

SEQ ID NO: 6666 - protein, 21 aa, Homo sapiens
QEEFESIEEALPDTDVLYMTR

SEQ ID NO: 6667 - protein, 13 aa, Homo sapiens
QFCQTVGYPCVVR

SEQ ID NO: 6668 - protein, 10 aa, Homo sapiens
RGIPGLPDGR

SEQ ID NO: 6669 - protein, 25 aa, Homo sapiens
RPVINAGDGVGEHPTQALLDIFTIR

SEQ ID NO: 6670 - protein, 8 aa, Homo sapiens
SELLPTVR

SEQ ID NO: 6671 - protein, 10 aa, Homo sapiens
SVGEVMGIGR

SEQ ID NO: 6672 - protein, 9 aa, Homo sapiens
SVHICHVAR

SEQ ID NO: 6673 - protein, 20 aa, Homo sapiens
TIMVNYNPETVSTDYDMCDR

SEQ ID NO: 6674 - protein, 12 aa, Homo sapiens
TLGVDLVALATR

SEQ ID NO: 6675 - protein, 20 aa, Homo sapiens
TLHEWLQQHGIPGLQGVDTR

SEQ ID NO: 6676 - protein, 13 aa, Homo sapiens
TPHVLVLGSGVYR

SEQ ID NO: 6677 - protein, 11 aa, Homo sapiens
TSSSFAAAMAR

SEQ ID NO: 6678 - protein, 13 aa, Homo sapiens
TVHSLACLLTQYR

SEQ ID NO: 6679 - protein, 9 aa, Homo sapiens
VFNTGGAPR

SEQ ID NO: 6680 - protein, 15 aa, Homo sapiens
VLGTPVETIELTEDR

SEQ ID NO: 6681 - protein, 16 aa, Homo sapiens
VLGTPVETIELTEDRR

SEQ ID NO: 6682 - protein, 15 aa, Homo sapiens
VLGTSPEAIDSAENR

SEQ ID NO: 6683 - protein, 13 aa, Homo sapiens
VNEISVEVDSDPR

SEQ ID NO: 6684 - protein, 8 aa, Homo sapiens
VPQFSFSR

SEQ ID NO: 6685 - protein, 20 aa, Homo sapiens
VTAVDWHFEEAVDGECPPQR

SEQ ID NO: 6686 - protein, 16 aa, Homo sapiens
VYFLPITPHYVTQVIR

SEQ ID NO: 6687 - protein, 8 aa, Homo sapiens
YVAPPSLR

SEQ ID NO: 6688 - protein, 8 aa, Homo sapiens
EIMNDLEK

SEQ ID NO: 6689 - protein, 7 aa, Homo sapiens
LVNQWIK

SEQ ID NO: 6690 - protein, 24 aa, Homo sapiens
ALNLFQGSVEDTTGSQSLAALLNK

SEQ ID NO: 6691 - protein, 15 aa, Homo sapiens
ECVLPGGETAGDMGK

SEQ ID NO: 6692 - protein, 15 aa, Homo sapiens
QMPFTEMSEENITIK

SEQ ID NO: 6693 - protein, 8 aa, Homo sapiens
MNFESFVK

SEQ ID NO: 6694 - protein, 17 aa, Homo sapiens
LYQGINQLPNVIQALEK

SEQ ID NO: 6695 - protein, 14 aa, Homo sapiens
FFQGMPEKPTTTVR

SEQ ID NO: 6696 - protein, 14 aa, Homo sapiens
NKTEYEEAQDAIVK

SEQ ID NO: 6697 - protein, 10 aa, Homo sapiens
LTSLNEEYTK

SEQ ID NO: 6698 - protein, 8 aa, Homo sapiens
IIQEFLSK

SEQ ID NO: 6699 - protein, 8 aa, Homo sapiens
DIYQDLNR

SEQ ID NO: 6700 - protein, 16 aa, Homo sapiens
GDFYTAHGEDALLAAR

SEQ ID NO: 6701 - protein, 8 aa, Homo sapiens
GGILITER

SEQ ID NO: 6702 - protein, 17 aa, Homo sapiens
GVSTFMAEMLETASILR

SEQ ID NO: 6703 - protein, 7 aa, Homo sapiens
LDIAAVR

SEQ ID NO: 6704 - protein, 12 aa, Homo sapiens
LDSSAQFGYYFR

SEQ ID NO: 6705 - protein, 14 aa, Homo sapiens
LNLVEAFVEDAELR

SEQ ID NO: 6706 - protein, 10 aa, Homo sapiens
MQSTLISAAR

SEQ ID NO: 6707 - protein, 11 aa, Homo sapiens
NNSFVNEIISR

SEQ ID NO: 6708 - protein, 10 aa, Homo sapiens
QAANLQDCYR

SEQ ID NO: 6709 - protein, 9 aa, Homo sapiens
QTLQEDLLR

SEQ ID NO: 6710 - protein, 12 aa, Homo sapiens
QVGVGYVDSIQR

SEQ ID NO: 6711 - protein, 7 aa, Homo sapiens
RFPDLNR

SEQ ID NO: 6712 - protein, 9 aa, Homo sapiens
VGAGDSQLK

SEQ ID NO: 6713 - protein, 14 aa, Homo sapiens
STVKPKPQLSHSSR

SEQ ID NO: 6714 - protein, 11 aa, Homo sapiens
REDYVGGQSHR

SEQ ID NO: 6715 - protein, 12 aa, Homo sapiens
ILTLESMNPQVK

SEQ ID NO: 6716 - protein, 11 aa, Homo sapiens
VKDFHINFLEK

SEQ ID NO: 6717 - protein, 19 aa, Homo sapiens
AVEAAQAHQMAPDMFYCMK

SEQ ID NO: 6718 - protein, 18 aa, Homo sapiens
LLEETGICVVPGSGFGQR

SEQ ID NO: 6719 - protein, 17 aa, Homo sapiens
VLCIINPGNPTGQVQSR

SEQ ID NO: 6720 - protein, 15 aa, Homo sapiens
VHSQGPHHVCELCNK

SEQ ID NO: 6721 - protein, 12 aa, Homo sapiens
KTGTTIAGVVYK

SEQ ID NO: 6722 - protein, 10 aa, Homo sapiens
ATEGMVVADK

SEQ ID NO: 6723 - protein, 20 aa, Homo sapiens
LPYVTMGSGSLAAMAVFEDK

SEQ ID NO: 6724 - protein, 13 aa, Homo sapiens
LDFLRPYTVPNKK

SEQ ID NO: 6725 - protein, 9 aa, Homo sapiens
GTTAVLTEK

SEQ ID NO: 6726 - protein, 11 aa, Homo sapiens
TGTTIAGVVYK

SEQ ID NO: 6727 - protein, 11 aa, Homo sapiens
FRPDMEEEEAK

SEQ ID NO: 6728 - protein, 12 aa, Homo sapiens
LDFLRPYTVPNK

SEQ ID NO: 6729 - protein, 19 aa, Homo sapiens
AAVSVYAPPVGGFSFDNCR

SEQ ID NO: 6730 - protein, 10 aa, Homo sapiens
DGIVLGADTR

SEQ ID NO: 6731 - protein, 19 aa, Homo sapiens
ITPLEIEVLEETVQTMDTS

SEQ ID NO: 6732 - protein, 11 aa, Homo sapiens
EIATNPEEAGK

SEQ ID NO: 6733 - protein, 8 aa, Homo sapiens
DHEVLFPK

SEQ ID NO: 6734 - protein, 12 aa, Homo sapiens
FGPHLVPILVEK

SEQ ID NO: 6735 - protein, 15 aa, Homo sapiens
GDTLASPNSETGPGK

SEQ ID NO: 6736 - protein, 10 aa, Homo sapiens
LDETVAYEQK

SEQ ID NO: 6737 - protein, 11 aa, Homo sapiens
DNYSLLSYICR

SEQ ID NO: 6738 - protein, 12 aa, Homo sapiens
NSGEEEIDSLQR

SEQ ID NO: 6739 - protein, 12 aa, Homo sapiens
SSVGWDATEDLR

SEQ ID NO: 6740 - protein, 14 aa, Homo sapiens
SEVPGIFCAGADLK

SEQ ID NO: 6741 - protein, 21 aa, Homo sapiens
AVGLISHVLEQNQEGDAAYRK

SEQ ID NO: 6742 - protein, 22 aa, Homo sapiens
VPFIHVGNQVVSELGPIVQFVK

SEQ ID NO: 6743 - protein, 28 aa, Homo sapiens
SLVAEAFVSQIAAAEPWPENATLYQQLK

SEQ ID NO: 6744 - protein, 11 aa, Homo sapiens
ANAEYMSPSGK

SEQ ID NO: 6745 - protein, 13 aa, Homo sapiens
GHSLSDGLEEVQK

SEQ ID NO: 6746 - protein, 9 aa, Homo sapiens
IEQHYFEDR

SEQ ID NO: 6747 - protein, 10 aa, Homo sapiens
RIEQHYFEDR

SEQ ID NO: 6748 - protein, 19 aa, Homo sapiens
TLDQVLEDVDQCCQALSQR

SEQ ID NO: 6749 - protein, 15 aa, Homo sapiens
VKDSDDVPMVLVGNK

SEQ ID NO: 6750 - protein, 15 aa, Homo sapiens
TGEGFLCVFAINNSK

SEQ ID NO: 6751 - protein, 13 aa, Homo sapiens
DSDDVPMVLVGNK

SEQ ID NO: 6752 - protein, 12 aa, Homo sapiens
SYGIPFIETSAK

SEQ ID NO: 6753 - protein, 26 aa, Homo sapiens
SALTIQLIQNHFVDEYDPTIEDSYRK

SEQ ID NO: 6754 - protein, 23 aa, Homo sapiens
LVVVGAGGVGKQGVEDAFYTLVR

SEQ ID NO: 6755 - protein, 25 aa, Homo sapiens
SALTIQLIQNHFVDEYDPTIEDSYR

SEQ ID NO: 6756 - protein, 9 aa, Homo sapiens
SFADINLYR

SEQ ID NO: 6757 - protein, 11 aa, Homo sapiens
NACDLFIPLDK

SEQ ID NO: 6758 - protein, 12 aa, Homo sapiens
LGNSADALESAK

SEQ ID NO: 6759 - protein, 15 aa, Homo sapiens
AAQYACSLLGHALQR

SEQ ID NO: 6760 - protein, 10 aa, Homo sapiens
AVHLSDVVLR

SEQ ID NO: 6761 - protein, 10 aa, Homo sapiens
FCITVSHLNR

SEQ ID NO: 6762 - protein, 8 aa, Homo sapiens
FSAQSQAR

SEQ ID NO: 6763 - protein, 12 aa, Homo sapiens
LLMEQESSACSR

SEQ ID NO: 6764 - protein, 8 aa, Homo sapiens
LQVLLLAR

SEQ ID NO: 6765 - protein, 10 aa, Homo sapiens
QLESHLSLGR

SEQ ID NO: 6766 - protein, 12 aa, Homo sapiens
YYLFSLIMNLSR

SEQ ID NO: 6767 - protein, 13 aa, Homo sapiens
LFQSVAQCCMGQK

SEQ ID NO: 6768 - protein, 12 aa, Homo sapiens
EPLLMSISTNLK

SEQ ID NO: 6769 - protein, 11 aa, Homo sapiens
DAIAALGLLQK

SEQ ID NO: 6770 - protein, 13 aa, Homo sapiens
TVTVTRPTGVSFK

SEQ ID NO: 6771 - protein, 24 aa, Homo sapiens
EMMDQAAAQLAQDNCELACCFIQK

SEQ ID NO: 6772 - protein, 14 aa, Homo sapiens
ILTNFTGVMPPQFK

SEQ ID NO: 6773 - protein, 13 aa, Homo sapiens
NVELTKPMQILYK

SEQ ID NO: 6774 - protein, 16 aa, Homo sapiens
IAFIFNNLSQSNMTQK

SEQ ID NO: 6775 - protein, 23 aa, Homo sapiens
NVPGFLPTNDLSQPTGFLAQPMK

SEQ ID NO: 6776 - protein, 8 aa, Homo sapiens
QLFSFPIK

SEQ ID NO: 6777 - protein, 19 aa, Homo sapiens
VSIEPNFHSLYSNFLDTLK

SEQ ID NO: 6778 - protein, 11 aa, Homo sapiens
IVEPPENIQEK

SEQ ID NO: 6779 - protein, 16 aa, Homo sapiens
NLALDINELKPGNLLK

SEQ ID NO: 6780 - protein, 14 aa, Homo sapiens
GQQELLYVVPFVAK

SEQ ID NO: 6781 - protein, 11 aa, Homo sapiens
LAEVGQYEQVK

SEQ ID NO: 6782 - protein, 17 aa, Homo sapiens
AQAEQQHNPAANPTMIR

SEQ ID NO: 6783 - protein, 19 aa, Homo sapiens
AVEGLLDATSGADADLLLR

SEQ ID NO: 6784 - protein, 12 aa, Homo sapiens
AVQELVHPVVDR

SEQ ID NO: 6785 - protein, 26 aa, Homo sapiens
CITELEQHLHAIPPTLAMNPQAQALR

SEQ ID NO: 6786 - protein, 12 aa, Homo sapiens
EIDDEANSYFQR

SEQ ID NO: 6787 - protein, 9 aa, Homo sapiens
EVTAAQVAR

SEQ ID NO: 6788 - protein, 14 aa, Homo sapiens
EVTYELDHPGFQIR

SEQ ID NO: 6789 - protein, 11 aa, Homo sapiens
GLHNVVYGIQR

SEQ ID NO: 6790 - protein, 15 aa, Homo sapiens
GNAPEGLPQLMEVVR

SEQ ID NO: 6791 - protein, 11 aa, Homo sapiens
IAMTTCEQIVR

SEQ ID NO: 6792 - protein, 21 aa, Homo sapiens
IYNHPPHPTMSVDEVLEMLQR

SEQ ID NO: 6793 - protein, 8 aa, Homo sapiens
MVLNETYR

SEQ ID NO: 6794 - protein, 9 aa, Homo sapiens
NLILSAFPR

SEQ ID NO: 6795 - protein, 10 aa, Homo sapiens
SLDLIESLLR

SEQ ID NO: 6796 - protein, 9 aa, Homo sapiens
SNYEAMIDR

SEQ ID NO: 6797 - protein, 10 aa, Homo sapiens
SPVTFLSDLR

SEQ ID NO: 6798 - protein, 12 aa, Homo sapiens
VDMLSEINIAPR

SEQ ID NO: 6799 - protein, 12 aa, Homo sapiens
YLFLNAIANQLR

SEQ ID NO: 6800 - protein, 11 aa, Homo sapiens
ATAEASGSDGK

SEQ ID NO: 6801 - protein, 23 aa, Homo sapiens
ATAEASGSDGKGQEVETSVTYYR

SEQ ID NO: 6802 - protein, 21 aa, Homo sapiens
NLDAVHDITVAYPHNIPQSEK

SEQ ID NO: 6803 - protein, 10 aa, Homo sapiens
TTGFTFVVDR

SEQ ID NO: 6804 - protein, 11 aa, Homo sapiens
HGSASFVSLLK

SEQ ID NO: 6805 - protein, 13 aa, Homo sapiens
STSLASVSQLASK

SEQ ID NO: 6806 - protein, 14 aa, Homo sapiens
GISSSNEGVEEPSK

SEQ ID NO: 6807 - protein, 13 aa, Homo sapiens
NSSSSGTSLLTPK

SEQ ID NO: 6808 - protein, 24 aa, Homo sapiens
GSEIEDLVLLDEESRPVNLPPALK

SEQ ID NO: 6809 - protein, 11 aa, Homo sapiens
ATLDVFFVPLK

SEQ ID NO: 6810 - protein, 13 aa, Homo sapiens
STSQVAASLLASK

SEQ ID NO: 6811 - protein, 21 aa, Homo sapiens
SVSSQSSSSVSSQVTTAGSGK

SEQ ID NO: 6812 - protein, 16 aa, Homo sapiens
SSGISSQNSSTSDGDR

SEQ ID NO: 6813 - protein, 11 aa, Homo sapiens
SSQESIVCELR

SEQ ID NO: 6814 - protein, 9 aa, Homo sapiens
VAAWVEALR

SEQ ID NO: 6815 - protein, 10 aa, Homo sapiens
VTDAPTYTTR

SEQ ID NO: 6816 - protein, 8 aa, Homo sapiens
KHEEEEAK

SEQ ID NO: 6817 - protein, 11 aa, Homo sapiens
QDYKEGEMTLK

SEQ ID NO: 6818 - protein, 22 aa, Homo sapiens
YLLQYQEPIPCEQLVTALCDIK

SEQ ID NO: 6819 - protein, 19 aa, Homo sapiens
HYGFQLYQSDPSGNYGGWK

SEQ ID NO: 6820 - protein, 9 aa, Homo sapiens
QKEVEQLIK

SEQ ID NO: 6821 - protein, 8 aa, Homo sapiens
SALALAIK

SEQ ID NO: 6822 - protein, 16 aa, Homo sapiens
ATCIGNNSAAAVSMLK

SEQ ID NO: 6823 - protein, 10 aa, Homo sapiens
LLDEVFFSEK

SEQ ID NO: 6824 - protein, 24 aa, Homo sapiens
LNEDMACSVAGITSDANVLTNELR

SEQ ID NO: 6825 - protein, 9 aa, Homo sapiens
TTIFSPEGR

SEQ ID NO: 6826 - protein, 8 aa, Homo sapiens
VEIATLTR

SEQ ID NO: 6827 - protein, 9 aa, Homo sapiens
PCVSIEGYK

SEQ ID NO: 6828 - protein, 10 aa, Homo sapiens
IEAACFATIK

SEQ ID NO: 6829 - protein, 8 aa, Homo sapiens
WMIPSEAK

SEQ ID NO: 6830 - protein, 23 aa, Homo sapiens
ENTEGEYSGIEHVIVDGVVQSIK

SEQ ID NO: 6831 - protein, 8 aa, Homo sapiens
LITEGASK

SEQ ID NO: 6832 - protein, 11 aa, Homo sapiens
NVTAIQGPGGK

SEQ ID NO: 6833 - protein, 18 aa, Homo sapiens
TFDLYANVRPCVSIEGYK

SEQ ID NO: 6834 - protein, 13 aa, Homo sapiens
IEAACFATIKDGK

SEQ ID NO: 6835 - protein, 9 aa, Homo sapiens
MSDGLFLQK

SEQ ID NO: 6836 - protein, 8 aa, Homo sapiens
APIQWEER

SEQ ID NO: 6837 - protein, 10 aa, Homo sapiens
CSDFTEEICR

SEQ ID NO: 6838 - protein, 17 aa, Homo sapiens
DMANPTALLLSAVMMLR

SEQ ID NO: 6839 - protein, 10 aa, Homo sapiens
HMGLFDHAAR

SEQ ID NO: 6840 - protein, 10 aa, Homo sapiens
IAEFAFEYAR

SEQ ID NO: 6841 - protein, 15 aa, Homo sapiens
TPIAAGHPSMNLLLR

SEQ ID NO: 6842 - protein, 12 aa, Homo sapiens
TPYTDVNIVTIR

SEQ ID NO: 6843 - protein, 7 aa, Homo sapiens
KFDEALK

SEQ ID NO: 6844 - protein, 10 aa, Homo sapiens
SFMNNWEVYK

SEQ ID NO: 6845 - protein, 19 aa, Homo sapiens
CNENYTTDFIFNLYSEEGK

SEQ ID NO: 6846 - protein, 11 aa, Homo sapiens
LLAHVRPPVSK

SEQ ID NO: 6847 - protein, 19 aa, Homo sapiens
ALVFQPVAELKDQTDFEHR

SEQ ID NO: 6848 - protein, 21 aa, Homo sapiens
GQIEEAGWSYVGGWTGQGGSK

SEQ ID NO: 6849 - protein, 12 aa, Homo sapiens
SEWSDLLSDLQK

SEQ ID NO: 6850 - protein, 11 aa, Homo sapiens
ALVFQPVAELK

SEQ ID NO: 6851 - protein, 19 aa, Homo sapiens
VFFVHEGYQGLVDGGDHIK

SEQ ID NO: 6852 - protein, 7 aa, Homo sapiens
AAYNLVK

SEQ ID NO: 6853 - protein, 12 aa, Homo sapiens
DLQANVEHLVQK

SEQ ID NO: 6854 - protein, 11 aa, Homo sapiens
LPLMECVQVTK

SEQ ID NO: 6855 - protein, 11 aa, Homo sapiens
SFEQISANITK

SEQ ID NO: 6856 - protein, 19 aa, Homo sapiens
AIAVLTSGGDAQGMNAAVR

SEQ ID NO: 6857 - protein, 8 aa, Homo sapiens
DQTDFEHR

SEQ ID NO: 6858 - protein, 21 aa, Homo sapiens
GITNLCVIGGDGSLTGADTFR

SEQ ID NO: 6859 - protein, 15 aa, Homo sapiens
IFANTPDSGCVLGMR

SEQ ID NO: 6860 - protein, 8 aa, Homo sapiens
IGLIQGNR

SEQ ID NO: 6861 - protein, 17 aa, Homo sapiens
IMEIVDAITTTAQSHQR

SEQ ID NO: 6862 - protein, 17 aa, Homo sapiens
NVLGHMQQGGSPTPFDR

SEQ ID NO: 6863 - protein, 23 aa, Homo sapiens
SGSHTVAVMNVGAPAAGMNAAVR

SEQ ID NO: 6864 - protein, 18 aa, Homo sapiens
YEIDLDTSDHAHLEHITR

SEQ ID NO: 6865 - protein, 12 aa, Homo sapiens
TNLDESDVQPVK

SEQ ID NO: 6866 - protein, 18 aa, Homo sapiens
EQLAQAMFDHIPVGVGSK

SEQ ID NO: 6867 - protein, 12 aa, Homo sapiens
GGGVGGFLPAMK

SEQ ID NO: 6868 - protein, 11 aa, Homo sapiens
IASPEGQDYLK

SEQ ID NO: 6869 - protein, 16 aa, Homo sapiens
GLGHQVATDALVAMEK

SEQ ID NO: 6870 - protein, 17 aa, Homo sapiens
EGYAWAEDKEHCEEYGR

SEQ ID NO: 6871 - protein, 23 aa, Homo sapiens
VFNTTPDDLDLHVIYDVSHNIAK

SEQ ID NO: 6872 - protein, 11 aa, Homo sapiens
LVMEEAPESYK

SEQ ID NO: 6873 - protein, 11 aa, Homo sapiens
SYNDELQFLEK

SEQ ID NO: 6874 - protein, 30 aa, Homo sapiens
TNLDESDVQPVKEQLAQAMFDHIPVGVGSK

SEQ ID NO: 6875 - protein, 16 aa, Homo sapiens
NVTDVVNTCHDAGISK

SEQ ID NO: 6876 - protein, 10 aa, Homo sapiens
NLDFQDVLDK

SEQ ID NO: 6877 - protein, 15 aa, Homo sapiens
DLEEALEMGVDWSLR

SEQ ID NO: 6878 - protein, 13 aa, Homo sapiens
GMAAAGNYAWVNR

SEQ ID NO: 6879 - protein, 12 aa, Homo sapiens
GQVCVMIHSGSR

SEQ ID NO: 6880 - protein, 9 aa, Homo sapiens
LADMGIAIR

SEQ ID NO: 6881 - protein, 7 aa, Homo sapiens
LMFEELR

SEQ ID NO: 6882 - protein, 14 aa, Homo sapiens
QIGNVAALPGIVHR

SEQ ID NO: 6883 - protein, 8 aa, Homo sapiens
SSMTFLTR

SEQ ID NO: 6884 - protein, 17 aa, Homo sapiens
KVEALDEACTDLLSHQK

SEQ ID NO: 6885 - protein, 7 aa, Homo sapiens
LDGALNR

SEQ ID NO: 6886 - protein, 11 aa, Homo sapiens
TQPGLFAEMFR

SEQ ID NO: 6887 - protein, 25 aa, Homo sapiens
SIMAAAGVPVVEGYHGEDQSDQCLK

SEQ ID NO: 6888 - protein, 13 aa, Homo sapiens
ESLCQAALGLILK

SEQ ID NO: 6889 - protein, 11 aa, Homo sapiens
IIEEAPAPGIK

SEQ ID NO: 6890 - protein, 8 aa, Homo sapiens
IGYPVMIK

SEQ ID NO: 6891 - protein, 18 aa, Homo sapiens
TFQVLGNLYSEGDCTYLK

SEQ ID NO: 6892 - protein, 18 aa, Homo sapiens
HTPLVEFEEEESDKRESE

SEQ ID NO: 6893 - protein, 15 aa, Homo sapiens
QGDEVSVHYDPMIAK

SEQ ID NO: 6894 - protein, 15 aa, Homo sapiens
KLGVQTVAVYSEADR

SEQ ID NO: 6895 - protein, 11 aa, Homo sapiens
SFNDDAMLIEK

SEQ ID NO: 6896 - protein, 12 aa, Homo sapiens
EGSIEIDIPVPK

SEQ ID NO: 6897 - protein, 23 aa, Homo sapiens
AMTDTFTLQAHDQFSPFSSSSGR

SEQ ID NO: 6898 - protein, 11 aa, Homo sapiens
HNFCFMEMNTR

SEQ ID NO: 6899 - protein, 18 aa, Homo sapiens
IPLSQEEITLQGHAFEAR

SEQ ID NO: 6900 - protein, 24 aa, Homo sapiens
IYAEDPSNNFMPVAGPLVHLSTPR

SEQ ID NO: 6901 - protein, 14 aa, Homo sapiens
LGVQTVAVYSEADR

SEQ ID NO: 6902 - protein, 8 aa, Homo sapiens
LVVWAADR

SEQ ID NO: 6903 - protein, 8 aa, Homo sapiens
RLNISYTR

SEQ ID NO: 6904 - protein, 13 aa, Homo sapiens
SEQEFQEQLESAR

SEQ ID NO: 6905 - protein, 17 aa, Homo sapiens
LTIEFTEEYPNKPPTVR

SEQ ID NO: 6906 - protein, 10 aa, Homo sapiens
VSAIVEQSWR

SEQ ID NO: 6907 - protein, 13 aa, Homo sapiens
AKPVNSKPDSAYR

SEQ ID NO: 6908 - protein, 17 aa, Homo sapiens
WLCTGDIGEFEPDGCLK

SEQ ID NO: 6909 - protein, 18 aa, Homo sapiens
LSPEPWTPETGLVTDAFK

SEQ ID NO: 6910 - protein, 17 aa, Homo sapiens
HIITVDGKPPTWSEFPK

SEQ ID NO: 6911 - protein, 11 aa, Homo sapiens
LQAGEYVSLGK

SEQ ID NO: 6912 - protein, 18 aa, Homo sapiens
GTWEELCNSCEMENEVLK

SEQ ID NO: 6913 - protein, 15 aa, Homo sapiens
IGYSSPQTLADQSSK

SEQ ID NO: 6914 - protein, 20 aa, Homo sapiens
GDTSMLKPTLMAAVPEIMDR

SEQ ID NO: 6915 - protein, 19 aa, Homo sapiens
GVMISHSNIIAGITGMAER

SEQ ID NO: 6916 - protein, 15 aa, Homo sapiens
LLLCGGAPLSATTQR

SEQ ID NO: 6917 - protein, 11 aa, Homo sapiens
NTPLCDSFVFR

SEQ ID NO: 6918 - protein, 10 aa, Homo sapiens
TNIAIFCETR

SEQ ID NO: 6919 - protein, 26 aa, Homo sapiens
QLENSLNEFGEKWELNSGDGAFYGPK

SEQ ID NO: 6920 - protein, 7 aa, Homo sapiens
MLKEWEK

SEQ ID NO: 6921 - protein, 13 aa, Homo sapiens
FLGDIEVWDQAEK

SEQ ID NO: 6922 - protein, 12 aa, Homo sapiens
MIAILTENYGGK

SEQ ID NO: 6923 - protein, 14 aa, Homo sapiens
FNLTYVSHDGDDKK

SEQ ID NO: 6924 - protein, 8 aa, Homo sapiens
ETLLAMFK

SEQ ID NO: 6925 - protein, 11 aa, Homo sapiens
TVYSVFGFSFK

SEQ ID NO: 6926 - protein, 8 aa, Homo sapiens
LEMYNILK

SEQ ID NO: 6927 - protein, 15 aa, Homo sapiens
FMADIDLDPGCTLNK

SEQ ID NO: 6928 - protein, 9 aa, Homo sapiens
KETLLAMFK

SEQ ID NO: 6929 - protein, 20 aa, Homo sapiens
FQQDDAHIFCAMEQIEDEIK

SEQ ID NO: 6930 - protein, 10 aa, Homo sapiens
AEHDSILAEK

SEQ ID NO: 6931 - protein, 17 aa, Homo sapiens
QVMVVPVGPTCDEYAQK

SEQ ID NO: 6932 - protein, 7 aa, Homo sapiens
VTLPDGK

SEQ ID NO: 6933 - protein, 10 aa, Homo sapiens
IYGISFPDPK

SEQ ID NO: 6934 - protein, 22 aa, Homo sapiens
TTPYQIACGISQGLADNTVIAK

SEQ ID NO: 6935 - protein, 14 aa, Homo sapiens
WELNSGDGAFYGPK

SEQ ID NO: 6936 - protein, 13 aa, Homo sapiens
FNLTYVSHDGDDK

SEQ ID NO: 6937 - protein, 9 aa, Homo sapiens
NSSTYWEGK

SEQ ID NO: 6938 - protein, 9 aa, Homo sapiens
LNLSTRPEK

SEQ ID NO: 6939 - protein, 12 aa, Homo sapiens
QLENSLNEFGEK

SEQ ID NO: 6940 - protein, 21 aa, Homo sapiens
RFQQDDAHIFCAMEQIEDEIK

SEQ ID NO: 6941 - protein, 22 aa, Homo sapiens
VNNVVWDLDRPLEEDCTLELLK

SEQ ID NO: 6942 - protein, 20 aa, Homo sapiens
DQELYFFHELSPGSCFFLPK

SEQ ID NO: 6943 - protein, 8 aa, Homo sapiens
ADMETLQR

SEQ ID NO: 6944 - protein, 13 aa, Homo sapiens
AELNPWPEYIYTR

SEQ ID NO: 6945 - protein, 8 aa, Homo sapiens
AILGSVER

SEQ ID NO: 6946 - protein, 9 aa, Homo sapiens
CGPLIDLCR

SEQ ID NO: 6947 - protein, 24 aa, Homo sapiens
FEDEEAQAVYWHSSAHIMGEAMER

SEQ ID NO: 6948 - protein, 7 aa, Homo sapiens
GCLDFLR

SEQ ID NO: 6949 - protein, 14 aa, Homo sapiens
GFQEVVTPNIFNSR

SEQ ID NO: 6950 - protein, 8 aa, Homo sapiens
ISGTVNIR

SEQ ID NO: 6951 - protein, 9 aa, Homo sapiens
LADFGVLHR

SEQ ID NO: 6952 - protein, 12 aa, Homo sapiens
NELSGALTGLTR

SEQ ID NO: 6953 - protein, 15 aa, Homo sapiens
RGFQEVVTPNIFNSR

SEQ ID NO: 6954 - protein, 8 aa, Homo sapiens
TISETIER

SEQ ID NO: 6955 - protein, 8 aa, Homo sapiens
WPFWLSPR

SEQ ID NO: 6956 - protein, 8 aa, Homo sapiens
TDQLPFEK

SEQ ID NO: 6957 - protein, 10 aa, Homo sapiens
WITPAFQIHK

SEQ ID NO: 6958 - protein, 19 aa, Homo sapiens
LFVPALDKPETDLLSHLDR

SEQ ID NO: 6959 - protein, 10 aa, Homo sapiens
AGPGVEDLWR

SEQ ID NO: 6960 - protein, 11 aa, Homo sapiens
EGSGPIAFAHK

SEQ ID NO: 6961 - protein, 15 aa, Homo sapiens
LGSFNWYGEQCSCGR

SEQ ID NO: 6962 - protein, 11 aa, Homo sapiens
MTPSSMLTTGR

SEQ ID NO: 6963 - protein, 8 aa, Homo sapiens
SSSILDHR

SEQ ID NO: 6964 - protein, 11 aa, Homo sapiens
TGDSVFLCFQK

SEQ ID NO: 6965 - protein, 13 aa, Homo sapiens
ADIVNYNQEPMSR

SEQ ID NO: 6966 - protein, 11 aa, Homo sapiens
YYGINDPVADK

SEQ ID NO: 6967 - protein, 11 aa, Homo sapiens
ATSLGSNTYNR

SEQ ID NO: 6968 - protein, 19 aa, Homo sapiens
NVCQTCLLDLEYGLPIQVR

SEQ ID NO: 6969 - protein, 20 aa, Homo sapiens
TITTLYVGGLGDTITETDLR

SEQ ID NO: 6970 - protein, 14 aa, Homo sapiens
NLAFHTLSQEVLLK

SEQ ID NO: 6971 - protein, 16 aa, Homo sapiens
STSGFDIINMLMGFDK

SEQ ID NO: 6972 - protein, 12 aa, Homo sapiens
SFLALDWDPDLK

SEQ ID NO: 6973 - protein, 12 aa, Homo sapiens
AEGGAADLDTQR

SEQ ID NO: 6974 - protein, 16 aa, Homo sapiens
LVSWYTLMEGQEPIAR

SEQ ID NO: 6975 - protein, 8 aa, Homo sapiens
LYNLLLLR

SEQ ID NO: 6976 - protein, 14 aa, Homo sapiens
QDTFSGTGFFPLDR

SEQ ID NO: 6977 - protein, 7 aa, Homo sapiens
VASLLVK

SEQ ID NO: 6978 - protein, 16 aa, Homo sapiens
SVGYKPDFVGFEIPDK

SEQ ID NO: 6979 - protein, 13 aa, Homo sapiens
DLNHVCVISETGK

SEQ ID NO: 6980 - protein, 12 aa, Homo sapiens
SYCNDQSTGDIK

SEQ ID NO: 6981 - protein, 10 aa, Homo sapiens
FFADLLDYIK

SEQ ID NO: 6982 - protein, 14 aa, Homo sapiens
EMGGHHIVALCVLK

SEQ ID NO: 6983 - protein, 13 aa, Homo sapiens
NVLIVEDIIDTGK

SEQ ID NO: 6984 - protein, 13 aa, Homo sapiens
VIGGDDLSTLTGK

SEQ ID NO: 6985 - protein, 14 aa, Homo sapiens
FVVGYALDYNEYFR

SEQ ID NO: 6986 - protein, 10 aa, Homo sapiens
SIPMTVDFIR

SEQ ID NO: 6987 - protein, 30 aa, Homo sapiens
SPGVVISDDEPGYDLDLFCIPNHYAEDLER

SEQ ID NO: 6988 - protein, 10 aa, Homo sapiens
TMQTLLSLVR

SEQ ID NO: 6989 - protein, 11 aa, Homo sapiens
VFIPHGLIMDR

SEQ ID NO: 6990 - protein, 9 aa, Homo sapiens
VLNQEEMEK

SEQ ID NO: 6991 - protein, 13 aa, Homo sapiens
GEDFYCVTCHETK

SEQ ID NO: 6992 - protein, 13 aa, Homo sapiens
CLHPLANETFVAK

SEQ ID NO: 6993 - protein, 12 aa, Homo sapiens
AIVAGDQNVEYK

SEQ ID NO: 6994 - protein, 15 aa, Homo sapiens
FVFHQEQVYCPDCAK

SEQ ID NO: 6995 - protein, 11 aa, Homo sapiens
QVIGTGSFFPK

SEQ ID NO: 6996 - protein, 8 aa, Homo sapiens
NPITGFGK

SEQ ID NO: 6997 - protein, 15 aa, Homo sapiens
FTAVEDQYYCVDCYK

SEQ ID NO: 6998 - protein, 10 aa, Homo sapiens
FCANTCVECR

SEQ ID NO: 6999 - protein, 7 aa, Homo sapiens
FDCHYCR

SEQ ID NO: 7000 - protein, 8 aa, Homo sapiens
FWHDTCFR

SEQ ID NO: 7001 - protein, 9 aa, Homo sapiens
LVEDKPGSR

SEQ ID NO: 7002 - protein, 12 aa, Homo sapiens
NGYGFVEFDDLR

SEQ ID NO: 7003 - protein, 15 aa, Homo sapiens
MKPDETPMFDPSLLK

SEQ ID NO: 7004 - protein, 18 aa, Homo sapiens
VLGQLTETGVVSPEQFMK

SEQ ID NO: 7005 - protein, 11 aa, Homo sapiens
LLLSTLTLLSK

SEQ ID NO: 7006 - protein, 14 aa, Homo sapiens
ITLECLPQNVGFYK

SEQ ID NO: 7007 - protein, 11 aa, Homo sapiens
VEDVVVSDECR

SEQ ID NO: 7008 - protein, 14 aa, Homo sapiens
KIENVPTGPNNKPK

SEQ ID NO: 7009 - protein, 12 aa, Homo sapiens
MKIELFADVVPK

SEQ ID NO: 7010 - protein, 10 aa, Homo sapiens
IELFADVVPK

SEQ ID NO: 7011 - protein, 9 aa, Homo sapiens
GPFADENFK

SEQ ID NO: 7012 - protein, 13 aa, Homo sapiens
IENVPTGPNNKPK

SEQ ID NO: 7013 - protein, 25 aa, Homo sapiens
AVANSSPVNPVVFFDVSIGGQEVGR

SEQ ID NO: 7014 - protein, 22 aa, Homo sapiens
DFMIQGGDFVNGDGTGVASIYR

SEQ ID NO: 7015 - protein, 9 aa, Homo sapiens
IIDGLLVMR

SEQ ID NO: 7016 - protein, 8 aa, Homo sapiens
QFCTGEFR

SEQ ID NO: 7017 - protein, 15 aa, Homo sapiens
IEIPIHIVPHVTIGK

SEQ ID NO: 7018 - protein, 26 aa, Homo sapiens
LEQNQQHLQELQQEKEELMQELSSLE

SEQ ID NO: 7019 - protein, 10 aa, Homo sapiens
LAELTGRPMR

SEQ ID NO: 7020 - protein, 17 aa, Homo sapiens
VEISPEQLSAASTEAER

SEQ ID NO: 7021 - protein, 32 aa, Homo sapiens
SQNPDPFADLGDLSSGLQGSPAGFPPGGFIPK

SEQ ID NO: 7022 - protein, 11 aa, Homo sapiens
YDLDACDIQEK

SEQ ID NO: 7023 - protein, 16 aa, Homo sapiens
TPEIIDLYSNFPIGEK

SEQ ID NO: 7024 - protein, 16 aa, Homo sapiens
IAVMSFPAEGVESALK

SEQ ID NO: 7025 - protein, 12 aa, Homo sapiens
AVVMTPVPLFSK

SEQ ID NO: 7026 - protein, 8 aa, Homo sapiens
LLDWIEGK

SEQ ID NO: 7027 - protein, 11 aa, Homo sapiens
GDLDISYITSR

SEQ ID NO: 7028 - protein, 22 aa, Homo sapiens
LCDFGSATTISHYPDYSWSAQR

SEQ ID NO: 7029 - protein, 22 aa, Homo sapiens
SLLQSALDFLAGPGSLGGASGR

SEQ ID NO: 7030 - protein, 9 aa, Homo sapiens
VSECGWAAR

SEQ ID NO: 7031 - protein, 18 aa, Homo sapiens
VSENDFEDLLSNQGFSSR

SEQ ID NO: 7032 - protein, 17 aa, Homo sapiens
AACLESAQEPAGAWGNK

SEQ ID NO: 7033 - protein, 15 aa, Homo sapiens
DLQEFIPLINQITAK

SEQ ID NO: 7034 - protein, 12 aa, Homo sapiens
ANVEAIMLAVMK

SEQ ID NO: 7035 - protein, 8 aa, Homo sapiens
TCFIILSK

SEQ ID NO: 7036 - protein, 12 aa, Homo sapiens
FFCFQVLEHQVK

SEQ ID NO: 7037 - protein, 8 aa, Homo sapiens
LVELWGGK

SEQ ID NO: 7038 - protein, 18 aa, Homo sapiens
ETLISWLQAQMLNPQPEK

SEQ ID NO: 7039 - protein, 12 aa, Homo sapiens
HIVPACFLAPLK

SEQ ID NO: 7040 - protein, 23 aa, Homo sapiens
LLYMLAEALPVSHGAHFSGDVSK

SEQ ID NO: 7041 - protein, 12 aa, Homo sapiens
DGPVGFADFVYK

SEQ ID NO: 7042 - protein, 13 aa, Homo sapiens
EEACDCLFEVVNK

SEQ ID NO: 7043 - protein, 9 aa, Homo sapiens
ALAYFEQLK

SEQ ID NO: 7044 - protein, 12 aa, Homo sapiens
NAQEALQAIETK

SEQ ID NO: 7045 - protein, 9 aa, Homo sapiens
NLLTPLMEK

SEQ ID NO: 7046 - protein, 19 aa, Homo sapiens
VLVTVIQGAVEYPDPIAQK

SEQ ID NO: 7047 - protein, 10 aa, Homo sapiens
QLTVLSDQQK

SEQ ID NO: 7048 - protein, 22 aa, Homo sapiens
QTFDLADAQTVLALSECAVTLK

SEQ ID NO: 7049 - protein, 10 aa, Homo sapiens
DVVHTSEEAR

SEQ ID NO: 7050 - protein, 7 aa, Homo sapiens
GVDLYLR

SEQ ID NO: 7051 - protein, 12 aa, Homo sapiens
ILMAIDSELVDR

SEQ ID NO: 7052 - protein, 16 aa, Homo sapiens
ISPDAWQVCAEALAQR

SEQ ID NO: 7053 - protein, 14 aa, Homo sapiens
LAQVSPELLLASVR

SEQ ID NO: 7054 - protein, 9 aa, Homo sapiens
LMLAQDEER

SEQ ID NO: 7055 - protein, 18 aa, Homo sapiens
MDEQALLGLNPNADSDFR

SEQ ID NO: 7056 - protein, 17 aa, Homo sapiens
QASLADCLNHAVGFASR

SEQ ID NO: 7057 - protein, 12 aa, Homo sapiens
QMNPFIEDILNR

SEQ ID NO: 7058 - protein, 14 aa, Homo sapiens
RVFSSTLQNWQTTR

SEQ ID NO: 7059 - protein, 7 aa, Homo sapiens
TAYLFSR

SEQ ID NO: 7060 - protein, 13 aa, Homo sapiens
VFSSTLQNWQTTR

SEQ ID NO: 7061 - protein, 13 aa, Homo sapiens
YSELTTVQQQLIR

SEQ ID NO: 7062 - protein, 34 aa, Homo sapiens
MGYAEEAPYDAIHVGAAAPVVPQALIDQLKPGGR

SEQ ID NO: 7063 - protein, 28 aa, Homo sapiens
KTQTVCNFTDGALVQHQEWDGKESTITR

SEQ ID NO: 7064 - protein, 19 aa, Homo sapiens
WLVIDPVPAAVPTQVAGPK

SEQ ID NO: 7065 - protein, 13 aa, Homo sapiens
FDFPYPNVEEAQK

SEQ ID NO: 7066 - protein, 27 aa, Homo sapiens
ASETPPPVAQPKPEAPHPGLETTLQER

SEQ ID NO: 7067 - protein, 20 aa, Homo sapiens
GINLPTPPGLSPGDLDVFVR

SEQ ID NO: 7068 - protein, 18 aa, Homo sapiens
GPASTPTYSPAPTQPAPR

SEQ ID NO: 7069 - protein, 11 aa, Homo sapiens
LDALEIACEVR

SEQ ID NO: 7070 - protein, 10 aa, Homo sapiens
QLQFYTEAAR

SEQ ID NO: 7071 - protein, 11 aa, Homo sapiens
SFDAVLEALSR

SEQ ID NO: 7072 - protein, 10 aa, Homo sapiens
TLENLLASIR

SEQ ID NO: 7073 - protein, 12 aa, Homo sapiens
KLFYSTFATDDR

SEQ ID NO: 7074 - protein, 18 aa, Homo sapiens
ALNALCDGLIDELNQALK

SEQ ID NO: 7075 - protein, 12 aa, Homo sapiens
LFYSTFATDDRK

SEQ ID NO: 7076 - protein, 9 aa, Homo sapiens
AFAAGADIK

SEQ ID NO: 7077 - protein, 13 aa, Homo sapiens
KLFYSTFATDDRK

SEQ ID NO: 7078 - protein, 13 aa, Homo sapiens
NNTVGLIQLNRPK

SEQ ID NO: 7079 - protein, 9 aa, Homo sapiens
HWDHLTQVK

SEQ ID NO: 7080 - protein, 18 aa, Homo sapiens
TFEEDPAVGAIVLTGGDK

SEQ ID NO: 7081 - protein, 14 aa, Homo sapiens
EMQNLSFQDCYSSK

SEQ ID NO: 7082 - protein, 9 aa, Homo sapiens
EGMTAFVEK

SEQ ID NO: 7083 - protein, 17 aa, Homo sapiens
ICPVETLVEEAIQCAEK

SEQ ID NO: 7084 - protein, 21 aa, Homo sapiens
AQFAQPEILIGTIPGAGGTQR

SEQ ID NO: 7085 - protein, 12 aa, Homo sapiens
SLAMEMVLTGDR

SEQ ID NO: 7086 - protein, 10 aa, Homo sapiens
LFSEGLFSAK

SEQ ID NO: 7087 - protein, 18 aa, Homo sapiens
LPNFGSHVLTPAEMEAFK

SEQ ID NO: 7088 - protein, 11 aa, Homo sapiens
VQEMVESNEAK

SEQ ID NO: 7089 - protein, 11 aa, Homo sapiens
LIASSLVAGEK

SEQ ID NO: 7090 - protein, 18 aa, Homo sapiens
AVETPPLSSVNLLEGLSR

SEQ ID NO: 7091 - protein, 30 aa, Homo sapiens
DEALQNISADDLPDSASQAAHPQDSAFSYR

SEQ ID NO: 7092 - protein, 18 aa, Homo sapiens
FSLCSDNLEGISEGPSNR

SEQ ID NO: 7093 - protein, 11 aa, Homo sapiens
FSTLTDDPSPR

SEQ ID NO: 7094 - protein, 13 aa, Homo sapiens
LAFYPNQDGDILR

SEQ ID NO: 7095 - protein, 19 aa, Homo sapiens
LALCSADSVAFPVLTHSTR

SEQ ID NO: 7096 - protein, 20 aa, Homo sapiens
LQELESCSGLGSTSDDTDVR

SEQ ID NO: 7097 - protein, 19 aa, Homo sapiens
NLMAQLQETMRNRLPIATR

SEQ ID NO: 7098 - protein, 15 aa, Homo sapiens
VNSYWFITADHLIEK

SEQ ID NO: 7099 - protein, 15 aa, Homo sapiens
DIKPAATHHYLVVPK

SEQ ID NO: 7100 - protein, 14 aa, Homo sapiens
DQVELVENMVTVGK

SEQ ID NO: 7101 - protein, 10 aa, Homo sapiens
DYDSTCVFCR

SEQ ID NO: 7102 - protein, 10 aa, Homo sapiens
NNFTDFTNVR

SEQ ID NO: 7103 - protein, 15 aa, Homo sapiens
LLQSIGQAPESISEK

SEQ ID NO: 7104 - protein, 13 aa, Homo sapiens
EHFQSYDLDHMEK

SEQ ID NO: 7105 - protein, 11 aa, Homo sapiens
DAAAVGNHVAK

SEQ ID NO: 7106 - protein, 9 aa, Homo sapiens
DDYVHEFCR

SEQ ID NO: 7107 - protein, 9 aa, Homo sapiens
EGQGNLPVR

SEQ ID NO: 7108 - protein, 16 aa, Homo sapiens
LADVLWNSQIPLLICR

SEQ ID NO: 7109 - protein, 23 aa, Homo sapiens
NVNTALNTTQIPSSIEDIFNDDR

SEQ ID NO: 7110 - protein, 10 aa, Homo sapiens
QTPSFWILAR

SEQ ID NO: 7111 - protein, 9 aa, Homo sapiens
TYGLVGYMR

SEQ ID NO: 7112 - protein, 10 aa, Homo sapiens
KQITMEELVR

SEQ ID NO: 7113 - protein, 8 aa, Homo sapiens
LSVYQAMK

SEQ ID NO: 7114 - protein, 16 aa, Homo sapiens
DPYTGQQISLFQAMQK

SEQ ID NO: 7115 - protein, 28 aa, Homo sapiens
LLEAQACTGGIIDPSTGERFPVTDAVNK

SEQ ID NO: 7116 - protein, 11 aa, Homo sapiens
SKEQAELEAAR

SEQ ID NO: 7117 - protein, 9 aa, Homo sapiens
LISLFQAMK

SEQ ID NO: 7118 - protein, 11 aa, Homo sapiens
EGLTSIEEVTK

SEQ ID NO: 7119 - protein, 26 aa, Homo sapiens
GIIRPGTAFELLEAQAATGYVIDPIK

SEQ ID NO: 7120 - protein, 12 aa, Homo sapiens
LKQSAEEQAQAR

SEQ ID NO: 7121 - protein, 16 aa, Homo sapiens
GDECQLVGPAQPSHWK

SEQ ID NO: 7122 - protein, 16 aa, Homo sapiens
GIYQSLEGAVQAGQLK

SEQ ID NO: 7123 - protein, 9 aa, Homo sapiens
MGIVGPEFK

SEQ ID NO: 7124 - protein, 16 aa, Homo sapiens
GANVIAGVWLEEAGQK

SEQ ID NO: 7125 - protein, 22 aa, Homo sapiens
AVTGYKDPYTGQQISLFQAMQK

SEQ ID NO: 7126 - protein, 17 aa, Homo sapiens
CRPDQLTGLSLLPLSEK

SEQ ID NO: 7127 - protein, 8 aa, Homo sapiens
LSIYNALK

SEQ ID NO: 7128 - protein, 10 aa, Homo sapiens
QYDIDDAIAK

SEQ ID NO: 7129 - protein, 10 aa, Homo sapiens
QSSEAEIQAK

SEQ ID NO: 7130 - protein, 12 aa, Homo sapiens
LKAEAELLQQQK

SEQ ID NO: 7131 - protein, 17 aa, Homo sapiens
QYINAIKDYELQLVTYK

SEQ ID NO: 7132 - protein, 9 aa, Homo sapiens
FPVTDAVNK

SEQ ID NO: 7133 - protein, 15 aa, Homo sapiens
CITDPQTGLCLLPLK

SEQ ID NO: 7134 - protein, 9 aa, Homo sapiens
RLTVNEAVK

SEQ ID NO: 7135 - protein, 9 aa, Homo sapiens
FKEMELPAK

SEQ ID NO: 7136 - protein, 8 aa, Homo sapiens
LPVEVAYK

SEQ ID NO: 7137 - protein, 10 aa, Homo sapiens
DLDKADSMIR

SEQ ID NO: 7138 - protein, 8 aa, Homo sapiens
LTVNEAVK

SEQ ID NO: 7139 - protein, 19 aa, Homo sapiens
LEDLLQDAQDEKEQLNEYK

SEQ ID NO: 7140 - protein, 9 aa, Homo sapiens
SSIAGLLLK

SEQ ID NO: 7141 - protein, 8 aa, Homo sapiens
LYVHEAVK

SEQ ID NO: 7142 - protein, 10 aa, Homo sapiens
QTLSIYQALK

SEQ ID NO: 7143 - protein, 10 aa, Homo sapiens
LLEAAAQSTK

SEQ ID NO: 7144 - protein, 21 aa, Homo sapiens
LQEDKEQMAQQLAEETQGFQR

SEQ ID NO: 7145 - protein, 10 aa, Homo sapiens
AEMEVLLASK

SEQ ID NO: 7146 - protein, 15 aa, Homo sapiens
LLDPEDVDVPQPDEK

SEQ ID NO: 7147 - protein, 13 aa, Homo sapiens
RKQEELQQLEQQR

SEQ ID NO: 7148 - protein, 10 aa, Homo sapiens
LLFNDVQTLK

SEQ ID NO: 7149 - protein, 10 aa, Homo sapiens
HKPLLIDMNK

SEQ ID NO: 7150 - protein, 11 aa, Homo sapiens
QLQLAQEAAQK

SEQ ID NO: 7151 - protein, 10 aa, Homo sapiens
LQLEETDHQK

SEQ ID NO: 7152 - protein, 10 aa, Homo sapiens
AQAEVEGLGK

SEQ ID NO: 7153 - protein, 9 aa, Homo sapiens
SELELTLGK

SEQ ID NO: 7154 - protein, 8 aa, Homo sapiens
AVVQLKPR

SEQ ID NO: 7155 - protein, 14 aa, Homo sapiens
SLESLHSFVAAATK

SEQ ID NO: 7156 - protein, 16 aa, Homo sapiens
DPYSGSTISLFQAMQK

SEQ ID NO: 7157 - protein, 17 aa, Homo sapiens
AGVVGPELHEQLLSAEK

SEQ ID NO: 7158 - protein, 11 aa, Homo sapiens
TPVEVPVGGFK

SEQ ID NO: 7159 - protein, 13 aa, Homo sapiens
AKLEQLFQDEVAK

SEQ ID NO: 7160 - protein, 21 aa, Homo sapiens
AVTGYRDPYTEQTISLFQAMK

SEQ ID NO: 7161 - protein, 10 aa, Homo sapiens
LQAEEVAQQK

SEQ ID NO: 7162 - protein, 18 aa, Homo sapiens
AALAHSEEVTASQVAATK

SEQ ID NO: 7163 - protein, 11 aa, Homo sapiens
LEQLFQDEVAK

SEQ ID NO: 7164 - protein, 15 aa, Homo sapiens
DPYTEQTISLFQAMK

SEQ ID NO: 7165 - protein, 19 aa, Homo sapiens
VVIVDPETGKEMSVYEAYR

SEQ ID NO: 7166 - protein, 12 aa, Homo sapiens
KQEELQQLEQQR

SEQ ID NO: 7167 - protein, 10 aa, Homo sapiens
LKAEATEAAR

SEQ ID NO: 7168 - protein, 11 aa, Homo sapiens
RQVEEEILALK

SEQ ID NO: 7169 - protein, 9 aa, Homo sapiens
KAALEEVER

SEQ ID NO: 7170 - protein, 19 aa, Homo sapiens
GLFDEEMNEILTDPSDDTK

SEQ ID NO: 7171 - protein, 15 aa, Homo sapiens
DPYTGQSVSLFQALK

SEQ ID NO: 7172 - protein, 12 aa, Homo sapiens
IIITVVEEQEQK

SEQ ID NO: 7173 - protein, 27 aa, Homo sapiens
SEEMQTVQQEQLLQETQALQQSFLSEK

SEQ ID NO: 7174 - protein, 11 aa, Homo sapiens
LRLPLDKEPAR

SEQ ID NO: 7175 - protein, 8 aa, Homo sapiens
FLQEEAEK

SEQ ID NO: 7176 - protein, 8 aa, Homo sapiens
VQMEELSK

SEQ ID NO: 7177 - protein, 12 aa, Homo sapiens
VPPGYHPLDVEK

SEQ ID NO: 7178 - protein, 11 aa, Homo sapiens
EGVVGPELHHK

SEQ ID NO: 7179 - protein, 10 aa, Homo sapiens
RQELEAELAK

SEQ ID NO: 7180 - protein, 17 aa, Homo sapiens
CVEDPETGLCLLPLTDK

SEQ ID NO: 7181 - protein, 9 aa, Homo sapiens
SLAQAEAEK

SEQ ID NO: 7182 - protein, 9 aa, Homo sapiens
ATVSAPFGK

SEQ ID NO: 7183 - protein, 10 aa, Homo sapiens
QVEEEILALK

SEQ ID NO: 7184 - protein, 10 aa, Homo sapiens
LPLLAVCDYK

SEQ ID NO: 7185 - protein, 7 aa, Homo sapiens
AQFEQLK

SEQ ID NO: 7186 - protein, 12 aa, Homo sapiens
REEAAVDAQQQK

SEQ ID NO: 7187 - protein, 10 aa, Homo sapiens
LAEVEAALEK

SEQ ID NO: 7188 - protein, 16 aa, Homo sapiens
LLDAQLSTGGIVDPSK

SEQ ID NO: 7189 - protein, 22 aa, Homo sapiens
RLQEDKEQMAQQLAEETQGFQR

SEQ ID NO: 7190 - protein, 16 aa, Homo sapiens
EAQAVPATLPELEATK

SEQ ID NO: 7191 - protein, 11 aa, Homo sapiens
AGLVGPEFHEK

SEQ ID NO: 7192 - protein, 8 aa, Homo sapiens
MSAAQALK

SEQ ID NO: 7193 - protein, 10 aa, Homo sapiens
VLADPSDDTK

SEQ ID NO: 7194 - protein, 8 aa, Homo sapiens
AALEEVER

SEQ ID NO: 7195 - protein, 9 aa, Homo sapiens
AELELELGR

SEQ ID NO: 7196 - protein, 17 aa, Homo sapiens
AEVVETTQVYTEEETRR

SEQ ID NO: 7197 - protein, 9 aa, Homo sapiens
AFCGFEDPR

SEQ ID NO: 7198 - protein, 21 aa, Homo sapiens
AGTLSITEFADMLSGNAGGFR

SEQ ID NO: 7199 - protein, 20 aa, Homo sapiens
AGVAAPATQVAQVTLQSVQR

SEQ ID NO: 7200 - protein, 9 aa, Homo sapiens
ALQALEELR

SEQ ID NO: 7201 - protein, 7 aa, Homo sapiens
ANELQLR

SEQ ID NO: 7202 - protein, 16 aa, Homo sapiens
APVPASELLASGVLSR

SEQ ID NO: 7203 - protein, 18 aa, Homo sapiens
AQAEAQQPTFDALRDELR

SEQ ID NO: 7204 - protein, 11 aa, Homo sapiens
AQLMADFQAGR

SEQ ID NO: 7205 - protein, 11 aa, Homo sapiens
AQVEQELTTLR

SEQ ID NO: 7206 - protein, 13 aa, Homo sapiens
ARQEELYSELQAR

SEQ ID NO: 7207 - protein, 22 aa, Homo sapiens
ATTAALLLEAQAATGFLVDPVR

SEQ ID NO: 7208 - protein, 19 aa, Homo sapiens
AYSDPSTGEPATYGELQQR

SEQ ID NO: 7209 - protein, 10 aa, Homo sapiens
CVEDPETGLR

SEQ ID NO: 7210 - protein, 20 aa, Homo sapiens
DALDGPAAEAEPEHSFDGLR

SEQ ID NO: 7211 - protein, 15 aa, Homo sapiens
DDGTGQLLLPLSDAR

SEQ ID NO: 7212 - protein, 29 aa, Homo sapiens
DLLPSDMAVALLEAQAGTGHIIDPATSAR

SEQ ID NO: 7213 - protein, 9 aa, Homo sapiens
DLSELGSVR

SEQ ID NO: 7214 - protein, 13 aa, Homo sapiens
DSQDAGGFGPEDR

SEQ ID NO: 7215 - protein, 13 aa, Homo sapiens
DTHDQLSEPSEVR

SEQ ID NO: 7216 - protein, 9 aa, Homo sapiens
DVAEVDTVR

SEQ ID NO: 7217 - protein, 10 aa, Homo sapiens
DVAEVDTVRR

SEQ ID NO: 7218 - protein, 8 aa, Homo sapiens
EAIAELER

SEQ ID NO: 7219 - protein, 11 aa, Homo sapiens
EEAAVDAQQQK

SEQ ID NO: 7220 - protein, 10 aa, Homo sapiens
ELIPTEEALR

SEQ ID NO: 7221 - protein, 8 aa, Homo sapiens
ELYQQLQR

SEQ ID NO: 7222 - protein, 9 aa, Homo sapiens
EMSVYEAYR

SEQ ID NO: 7223 - protein, 13 aa, Homo sapiens
ENAAYFQFFSDVR

SEQ ID NO: 7224 - protein, 19 aa, Homo sapiens
EQELQQTLQQEQSVLDQLR

SEQ ID NO: 7225 - protein, 11 aa, Homo sapiens
EQLQLLEEQHR

SEQ ID NO: 7226 - protein, 15 aa, Homo sapiens
EQLRQEQALLEEIER

SEQ ID NO: 7227 - protein, 14 aa, Homo sapiens
ESADPLGAWLQDAR

SEQ ID NO: 7228 - protein, 25 aa, Homo sapiens
EYGSCSHHYQQLLQSLEQGAQEESR

SEQ ID NO: 7229 - protein, 7 aa, Homo sapiens
FAEQTLR

SEQ ID NO: 7230 - protein, 19 aa, Homo sapiens
FLEVQYLTGGLIEPDTPGR

SEQ ID NO: 7231 - protein, 9 aa, Homo sapiens
GCLDEETSR

SEQ ID NO: 7232 - protein, 19 aa, Homo sapiens
GFFDPNTEENLTYLQLMER

SEQ ID NO: 7233 - protein, 19 aa, Homo sapiens
GFFDPNTHENLTYLQLLER

SEQ ID NO: 7234 - protein, 14 aa, Homo sapiens
GFFDPNTHENLTYR

SEQ ID NO: 7235 - protein, 11 aa, Homo sapiens
GGAEGELQALR

SEQ ID NO: 7236 - protein, 12 aa, Homo sapiens
GGELVYTDSEAR

SEQ ID NO: 7237 - protein, 10 aa, Homo sapiens
GLHQSIEEFR

SEQ ID NO: 7238 - protein, 9 aa, Homo sapiens
GLLSAEVAR

SEQ ID NO: 7239 - protein, 8 aa, Homo sapiens
GLVEDTLR

SEQ ID NO: 7240 - protein, 10 aa, Homo sapiens
GLVGPELHDR

SEQ ID NO: 7241 - protein, 10 aa, Homo sapiens
GWLYYEAGQR

SEQ ID NO: 7242 - protein, 9 aa, Homo sapiens
GYFDEEMNR

SEQ ID NO: 7243 - protein, 9 aa, Homo sapiens
GYFSEEMNR

SEQ ID NO: 7244 - protein, 18 aa, Homo sapiens
GYYSPYSVSGSGSTAGSR

SEQ ID NO: 7245 - protein, 9 aa, Homo sapiens
HHTAAFEER

SEQ ID NO: 7246 - protein, 10 aa, Homo sapiens
HISDLYEDLR

SEQ ID NO: 7247 - protein, 9 aa, Homo sapiens
HPQGEQMYR

SEQ ID NO: 7248 - protein, 11 aa, Homo sapiens
IISLETYNLLR

SEQ ID NO: 7249 - protein, 9 aa, Homo sapiens
LAAEQELIR

SEQ ID NO: 7250 - protein, 9 aa, Homo sapiens
LAAIGEATR

SEQ ID NO: 7251 - protein, 13 aa, Homo sapiens
LAQGHTTVDELAR

SEQ ID NO: 7252 - protein, 7 aa, Homo sapiens
LCFEGLR

SEQ ID NO: 7253 - protein, 8 aa, Homo sapiens
LFNAIIHR

SEQ ID NO: 7254 - protein, 13 aa, Homo sapiens
LGFHLPLEVAYQR

SEQ ID NO: 7255 - protein, 8 aa, Homo sapiens
LHVAILER

SEQ ID NO: 7256 - protein, 15 aa, Homo sapiens
LLDAQLATGGIVDPR

SEQ ID NO: 7257 - protein, 19 aa, Homo sapiens
LLEAQACTGGIIDPSTGER

SEQ ID NO: 7258 - protein, 19 aa, Homo sapiens
LLEAQIATGGIIDPEESHR

SEQ ID NO: 7259 - protein, 19 aa, Homo sapiens
LLEAQIATGGIIDPVHSHR

SEQ ID NO: 7260 - protein, 19 aa, Homo sapiens
LLEAQIATGGVIDPVHSHR

SEQ ID NO: 7261 - protein, 7 aa, Homo sapiens
LLLWSQR

SEQ ID NO: 7262 - protein, 9 aa, Homo sapiens
LPLDKEPAR

SEQ ID NO: 7263 - protein, 8 aa, Homo sapiens
LQAEEAER

SEQ ID NO: 7264 - protein, 9 aa, Homo sapiens
LQAEEAERR

SEQ ID NO: 7265 - protein, 14 aa, Homo sapiens
LQEAGILSAEELQR

SEQ ID NO: 7266 - protein, 9 aa, Homo sapiens
LQLEACETR

SEQ ID NO: 7267 - protein, 8 aa, Homo sapiens
LQLEATER

SEQ ID NO: 7268 - protein, 24 aa, Homo sapiens
LQMEAGLCEEQLNQADALLQSDVR

SEQ ID NO: 7269 - protein, 12 aa, Homo sapiens
LQNVQIALDYLR

SEQ ID NO: 7270 - protein, 12 aa, Homo sapiens
LRAETEQGEQQR

SEQ ID NO: 7271 - protein, 13 aa, Homo sapiens
LREQLQLLEEQHR

SEQ ID NO: 7272 - protein, 7 aa, Homo sapiens
LSFSGLR

SEQ ID NO: 7273 - protein, 10 aa, Homo sapiens
LSVAAQEAAR

SEQ ID NO: 7274 - protein, 9 aa, Homo sapiens
LSVYAALQR

SEQ ID NO: 7275 - protein, 8 aa, Homo sapiens
LSYTQLLR

SEQ ID NO: 7276 - protein, 10 aa, Homo sapiens
LTAEDLFEAR

SEQ ID NO: 7277 - protein, 8 aa, Homo sapiens
LTVDEAVR

SEQ ID NO: 7278 - protein, 8 aa, Homo sapiens
LTVEEAVR

SEQ ID NO: 7279 - protein, 9 aa, Homo sapiens
LVASMEEAR

SEQ ID NO: 7280 - protein, 7 aa, Homo sapiens
MQEEVVR

SEQ ID NO: 7281 - protein, 9 aa, Homo sapiens
MVEGYQGLR

SEQ ID NO: 7282 - protein, 9 aa, Homo sapiens
NLLDEELQR

SEQ ID NO: 7283 - protein, 10 aa, Homo sapiens
NLVDNITGQR

SEQ ID NO: 7284 - protein, 9 aa, Homo sapiens
QAEVELASR

SEQ ID NO: 7285 - protein, 15 aa, Homo sapiens
QALHSLELHYQAFLR

SEQ ID NO: 7286 - protein, 11 aa, Homo sapiens
QEELYSELQAR

SEQ ID NO: 7287 - protein, 11 aa, Homo sapiens
QEQALLEEIER

SEQ ID NO: 7288 - protein, 16 aa, Homo sapiens
QEQIQAMPLADSQAVR

SEQ ID NO: 7289 - protein, 9 aa, Homo sapiens
QITMEELVR

SEQ ID NO: 7290 - protein, 10 aa, Homo sapiens
QLEMSAEAER

SEQ ID NO: 7291 - protein, 12 aa, Homo sapiens
QQEELLAEENQR

SEQ ID NO: 7292 - protein, 11 aa, Homo sapiens
QQGLASYDYVR

SEQ ID NO: 7293 - protein, 9 aa, Homo sapiens
QRELEQLGR

SEQ ID NO: 7294 - protein, 11 aa, Homo sapiens
QVQVALETAQR

SEQ ID NO: 7295 - protein, 10 aa, Homo sapiens
RPELEDSTLR

SEQ ID NO: 7296 - protein, 17 aa, Homo sapiens
RQEQIQAMPLADSQAVR

SEQ ID NO: 7297 - protein, 13 aa, Homo sapiens
RQQEELLAEENQR

SEQ ID NO: 7298 - protein, 7 aa, Homo sapiens
SALDQYR

SEQ ID NO: 7299 - protein, 11 aa, Homo sapiens
SDEGQLSPATR

SEQ ID NO: 7300 - protein, 15 aa, Homo sapiens
SIITYVSSLYDAMPR

SEQ ID NO: 7301 - protein, 10 aa, Homo sapiens
SIQEELQQLR

SEQ ID NO: 7302 - protein, 13 aa, Homo sapiens
SLQEEHVAVAQLR

SEQ ID NO: 7303 - protein, 12 aa, Homo sapiens
SLVPAAELLESR

SEQ ID NO: 7304 - protein, 8 aa, Homo sapiens
SNAEDTLR

SEQ ID NO: 7305 - protein, 11 aa, Homo sapiens
SQVEEELFSVR

SEQ ID NO: 7306 - protein, 13 aa, Homo sapiens
SQVMDEATALQLR

SEQ ID NO: 7307 - protein, 18 aa, Homo sapiens
SSSVGSSSSYPISPAVSR

SEQ ID NO: 7308 - protein, 8 aa, Homo sapiens
SWSLATFR

SEQ ID NO: 7309 - protein, 10 aa, Homo sapiens
SYVDPSTDER

SEQ ID NO: 7310 - protein, 7 aa, Homo sapiens
TISLVIR

SEQ ID NO: 7311 - protein, 18 aa, Homo sapiens
TVTIWEIINSEYFTAEQR

SEQ ID NO: 7312 - protein, 18 aa, Homo sapiens
TVTVWELISSEYFTAEQR

SEQ ID NO: 7313 - protein, 7 aa, Homo sapiens
VAQLLER

SEQ ID NO: 7314 - protein, 21 aa, Homo sapiens
VDGAEWGVDLPSVEAQLGSHR

SEQ ID NO: 7315 - protein, 12 aa, Homo sapiens
VIDRELYQQLQR

SEQ ID NO: 7316 - protein, 15 aa, Homo sapiens
VLALPEPSPAAPTLR

SEQ ID NO: 7317 - protein, 9 aa, Homo sapiens
VPDVQDGVR

SEQ ID NO: 7318 - protein, 9 aa, Homo sapiens
VPLDEALQR

SEQ ID NO: 7319 - protein, 9 aa, Homo sapiens
VPLDVACAR

SEQ ID NO: 7320 - protein, 9 aa, Homo sapiens
VPQPEGLGR

SEQ ID NO: 7321 - protein, 9 aa, Homo sapiens
VPVDVAYQR

SEQ ID NO: 7322 - protein, 16 aa, Homo sapiens
VQSGSESVIQEYVDLR

SEQ ID NO: 7323 - protein, 9 aa, Homo sapiens
VSITEAMHR

SEQ ID NO: 7324 - protein, 11 aa, Homo sapiens
VTLVQTLEIQR

SEQ ID NO: 7325 - protein, 11 aa, Homo sapiens
WQAVLAQTDVR

SEQ ID NO: 7326 - protein, 15 aa, Homo sapiens
YLQDLLAWVEENQHR

SEQ ID NO: 7327 - protein, 7 aa, Homo sapiens
KLQIGVK

SEQ ID NO: 7328 - protein, 15 aa, Homo sapiens
GWDQGLLGMCEGEKR

SEQ ID NO: 7329 - protein, 12 aa, Homo sapiens
KGDVLHMHYTGK

SEQ ID NO: 7330 - protein, 13 aa, Homo sapiens
KLVIPSELGYGER

SEQ ID NO: 7331 - protein, 14 aa, Homo sapiens
GWDQGLLGMCEGEK

SEQ ID NO: 7332 - protein, 11 aa, Homo sapiens
GDVLHMHYTGK

SEQ ID NO: 7333 - protein, 15 aa, Homo sapiens
IPGGATLVFEVELLK

SEQ ID NO: 7334 - protein, 12 aa, Homo sapiens
LVIPSELGYGER

SEQ ID NO: 7335 - protein, 18 aa, Homo sapiens
MRPWLEEQINSNTIPGLK

SEQ ID NO: 7336 - protein, 11 aa, Homo sapiens
HQPGVDKPDPK

SEQ ID NO: 7337 - protein, 18 aa, Homo sapiens
VKLDSPAGTALSPSGHTK

SEQ ID NO: 7338 - protein, 18 aa, Homo sapiens
ELQSMADQEQVSPAAIKK

SEQ ID NO: 7339 - protein, 16 aa, Homo sapiens
SVGFIGAGQLAFALAK

SEQ ID NO: 7340 - protein, 17 aa, Homo sapiens
ELQSMADQEQVSPAAIK

SEQ ID NO: 7341 - protein, 13 aa, Homo sapiens
MLLHSEQHPGQLK

SEQ ID NO: 7342 - protein, 11 aa, Homo sapiens
LGAQALLGAAK

SEQ ID NO: 7343 - protein, 12 aa, Homo sapiens
GFTAAGVLAAHK

SEQ ID NO: 7344 - protein, 10 aa, Homo sapiens
CMTNTPVVVR

SEQ ID NO: 7345 - protein, 23 aa, Homo sapiens
DNVSSPGGATIHALHVLESGGFR

SEQ ID NO: 7346 - protein, 18 aa, Homo sapiens
EGATVYATGTHAQVEDGR

SEQ ID NO: 7347 - protein, 17 aa, Homo sapiens
IMASSPDMDLATVSALR

SEQ ID NO: 7348 - protein, 11 aa, Homo sapiens
VVVCGQASVGK

SEQ ID NO: 7349 - protein, 12 aa, Homo sapiens
SLLEPFVYLASK

SEQ ID NO: 7350 - protein, 16 aa, Homo sapiens
ALEELQEALAEKEELR

SEQ ID NO: 7351 - protein, 12 aa, Homo sapiens
LNPASAEIMLLR

SEQ ID NO: 7352 - protein, 12 aa, Homo sapiens
AIDTTQLFSLPK

SEQ ID NO: 7353 - protein, 20 aa, Homo sapiens
DEGWLAEHMLILGITSPAGK

SEQ ID NO: 7354 - protein, 17 aa, Homo sapiens
EIISFGSGYGGNSLLGK

SEQ ID NO: 7355 - protein, 16 aa, Homo sapiens
LGTPVLQALGDGDFVK

SEQ ID NO: 7356 - protein, 10 aa, Homo sapiens
HGVFVGSAMR

SEQ ID NO: 7357 - protein, 10 aa, Homo sapiens
TLIGHVPDQR

SEQ ID NO: 7358 - protein, 16 aa, Homo sapiens
LWQTLYSFSQLGGLEK

SEQ ID NO: 7359 - protein, 17 aa, Homo sapiens
GSPSAAFTFPDTDDFGK

SEQ ID NO: 7360 - protein, 15 aa, Homo sapiens
LSPQYMCEAMLILGK

SEQ ID NO: 7361 - protein, 20 aa, Homo sapiens
GAGAYICGEETALIESIEGK

SEQ ID NO: 7362 - protein, 10 aa, Homo sapiens
GGTWFAGFGR

SEQ ID NO: 7363 - protein, 33 aa, Homo sapiens
LLEVPVMLTEQYPQGLGPTVPELGTEGLRPLAK

SEQ ID NO: 7364 - protein, 9 aa, Homo sapiens
HFRPELEER

SEQ ID NO: 7365 - protein, 23 aa, Homo sapiens
QIEGHTICALGDGAAWPVQGLIR

SEQ ID NO: 7366 - protein, 10 aa, Homo sapiens
ALGLAHVAIK

SEQ ID NO: 7367 - protein, 21 aa, Homo sapiens
CVTLEPDNAEAWNNLSTSYIR

SEQ ID NO: 7368 - protein, 13 aa, Homo sapiens
LTAIQSLPWWTLR

SEQ ID NO: 7369 - protein, 10 aa, Homo sapiens
MWTPELAILR

SEQ ID NO: 7370 - protein, 17 aa, Homo sapiens
SPLLFTLAENCIDQVMK

SEQ ID NO: 7371 - protein, 18 aa, Homo sapiens
TGLVGMLTHLDDLQLIQK

SEQ ID NO: 7372 - protein, 12 aa, Homo sapiens
LGHNAFSWVFSR

SEQ ID NO: 7373 - protein, 11 aa, Homo sapiens
LLEQVHGEEER

SEQ ID NO: 7374 - protein, 10 aa, Homo sapiens
EDKHECPFGR

SEQ ID NO: 7375 - protein, 7 aa, Homo sapiens
IASFVNK

SEQ ID NO: 7376 - protein, 18 aa, Homo sapiens
SLAILESMVLNSHDLYQK

SEQ ID NO: 7377 - protein, 8 aa, Homo sapiens
KPLSAIIK

SEQ ID NO: 7378 - protein, 18 aa, Homo sapiens
LLDLENIQIPDAPPPIPK

SEQ ID NO: 7379 - protein, 11 aa, Homo sapiens
LQNLSYTEILK

SEQ ID NO: 7380 - protein, 23 aa, Homo sapiens
VLHYGDLEESPQGEVPHDSLQDK

SEQ ID NO: 7381 - protein, 10 aa, Homo sapiens
IQPEILELIK

SEQ ID NO: 7382 - protein, 13 aa, Homo sapiens
ALTTKPSSLDQFK

SEQ ID NO: 7383 - protein, 12 aa, Homo sapiens
NDLDTLLSMEIK

SEQ ID NO: 7384 - protein, 7 aa, Homo sapiens
LPVADIK

SEQ ID NO: 7385 - protein, 18 aa, Homo sapiens
IAFDAESEPNNSSGSMEK

SEQ ID NO: 7386 - protein, 8 aa, Homo sapiens
PPPADIVK

SEQ ID NO: 7387 - protein, 15 aa, Homo sapiens
MNQEDFQSRPILELK

SEQ ID NO: 7388 - protein, 11 aa, Homo sapiens
VAIEWPGAYPK

SEQ ID NO: 7389 - protein, 7 aa, Homo sapiens
DIIFELR

SEQ ID NO: 7390 - protein, 8 aa, Homo sapiens
DMMSDLTR

SEQ ID NO: 7391 - protein, 8 aa, Homo sapiens
LVEGTCFR

SEQ ID NO: 7392 - protein, 9 aa, Homo sapiens
MDPQDQAQR

SEQ ID NO: 7393 - protein, 10 aa, Homo sapiens
SAIDISILQR

SEQ ID NO: 7394 - protein, 9 aa, Homo sapiens
SIILTHVIR

SEQ ID NO: 7395 - protein, 21 aa, Homo sapiens
VGELPSETCNDFHPMFFTHDR

SEQ ID NO: 7396 - protein, 7 aa, Homo sapiens
FIEELKK

SEQ ID NO: 7397 - protein, 13 aa, Homo sapiens
VCEATYDTTLVEK

SEQ ID NO: 7398 - protein, 12 aa, Homo sapiens
MNRPAPVEVTYK

SEQ ID NO: 7399 - protein, 14 aa, Homo sapiens
FLITHNPTNATLNK

SEQ ID NO: 7400 - protein, 15 aa, Homo sapiens
APVLVALALIEGGMK

SEQ ID NO: 7401 - protein, 19 aa, Homo sapiens
FREEPGCCIAVHCVAGLGR

SEQ ID NO: 7402 - protein, 9 aa, Homo sapiens
YEDAVQFIR

SEQ ID NO: 7403 - protein, 11 aa, Homo sapiens
GFLVFAGCLMK

SEQ ID NO: 7404 - protein, 9 aa, Homo sapiens
YEMYPLGVK

SEQ ID NO: 7405 - protein, 26 aa, Homo sapiens
VSVVEPGNFIAATSLYSPESIQAIAK

SEQ ID NO: 7406 - protein, 17 aa, Homo sapiens
AVLVTGCDSGFGFSLAK

SEQ ID NO: 7407 - protein, 9 aa, Homo sapiens
ELDSLNSDR

SEQ ID NO: 7408 - protein, 11 aa, Homo sapiens
FGVEAFSDCLR

SEQ ID NO: 7409 - protein, 31 aa, Homo sapiens
METYCSSGSTDTSPVIDAVTHALTATTPYTR

SEQ ID NO: 7410 - protein, 18 aa, Homo sapiens
MQIMTHLPGAISDMIYIR

SEQ ID NO: 7411 - protein, 10 aa, Homo sapiens
MWEELPEVVR

SEQ ID NO: 7412 - protein, 12 aa, Homo sapiens
QVAEVNLWGTVR

SEQ ID NO: 7413 - protein, 10 aa, Homo sapiens
VVNISSMLGR

SEQ ID NO: 7414 - protein, 7 aa, Homo sapiens
GEYVVAK

SEQ ID NO: 7415 - protein, 10 aa, Homo sapiens
KVYDQMPEPR

SEQ ID NO: 7416 - protein, 14 aa, Homo sapiens
QSDVMIVAGTLTNK

SEQ ID NO: 7417 - protein, 9 aa, Homo sapiens
LDDLVNWAR

SEQ ID NO: 7418 - protein, 7 aa, Homo sapiens
RLQIWYR

SEQ ID NO: 7419 - protein, 9 aa, Homo sapiens
VYDQMPEPR

SEQ ID NO: 7420 - protein, 13 aa, Homo sapiens
SLGEIPIVESEIK

SEQ ID NO: 7421 - protein, 19 aa, Homo sapiens
LVEKPSPLTLAPHDFANIK

SEQ ID NO: 7422 - protein, 12 aa, Homo sapiens
AAAQCYIDLIIK

SEQ ID NO: 7423 - protein, 14 aa, Homo sapiens
SLGEIPIVESEIKK

SEQ ID NO: 7424 - protein, 18 aa, Homo sapiens
EAGELKPEEEITVGPVQK

SEQ ID NO: 7425 - protein, 15 aa, Homo sapiens
LKEAELLEPLMPAIR

SEQ ID NO: 7426 - protein, 30 aa, Homo sapiens
SIFGEDALANVSIEKPIHQGPDAAVTGHIR

SEQ ID NO: 7427 - protein, 19 aa, Homo sapiens
VTVNTNMVDLNDYLQHILK

SEQ ID NO: 7428 - protein, 10 aa, Homo sapiens
KPITDDDVDR

SEQ ID NO: 7429 - protein, 18 aa, Homo sapiens
YEAAGTLVTLSSAPTAIK

SEQ ID NO: 7430 - protein, 8 aa, Homo sapiens
YVALVQEK

SEQ ID NO: 7431 - protein, 11 aa, Homo sapiens
FVLPLQDHTIK

SEQ ID NO: 7432 - protein, 14 aa, Homo sapiens
TNNVSEHEDTDKYR

SEQ ID NO: 7433 - protein, 18 aa, Homo sapiens
NVTVQPDDPISFMQLTAK

SEQ ID NO: 7434 - protein, 9 aa, Homo sapiens
MLEVFHAIK

SEQ ID NO: 7435 - protein, 14 aa, Homo sapiens
CIYNLLQSSSPAVK

SEQ ID NO: 7436 - protein, 11 aa, Homo sapiens
SQGMALSLGDK

SEQ ID NO: 7437 - protein, 21 aa, Homo sapiens
LVTEMGTYATQSALSSSRPTK

SEQ ID NO: 7438 - protein, 15 aa, Homo sapiens
VLSECSPLMNDIFNK

SEQ ID NO: 7439 - protein, 10 aa, Homo sapiens
QSLSHMLSAK

SEQ ID NO: 7440 - protein, 16 aa, Homo sapiens
ALSGYCGFMAANLYAR

SEQ ID NO: 7441 - protein, 10 aa, Homo sapiens
DLQHPNEFIR

SEQ ID NO: 7442 - protein, 13 aa, Homo sapiens
EAELLEPLMPAIR

SEQ ID NO: 7443 - protein, 11 aa, Homo sapiens
EDIQSVMTEIR

SEQ ID NO: 7444 - protein, 17 aa, Homo sapiens
EDQFQLSLLAAMGNTQR

SEQ ID NO: 7445 - protein, 13 aa, Homo sapiens
LLHEMILVCDAYR

SEQ ID NO: 7446 - protein, 10 aa, Homo sapiens
LPGLLMTIIR

SEQ ID NO: 7447 - protein, 18 aa, Homo sapiens
LVTEMGTYATQSALSSSR

SEQ ID NO: 7448 - protein, 13 aa, Homo sapiens
NAFMMLIHADQDR

SEQ ID NO: 7449 - protein, 11 aa, Homo sapiens
NAVLAIYTIYR

SEQ ID NO: 7450 - protein, 24 aa, Homo sapiens
VASTENGIIFGNIVYDVSGAASDR

SEQ ID NO: 7451 - protein, 11 aa, Homo sapiens
VLQDLVMDILR

SEQ ID NO: 7452 - protein, 10 aa, Homo sapiens
VLSTPDLEVR

SEQ ID NO: 7453 - protein, 10 aa, Homo sapiens
SLFLFDEMDK

SEQ ID NO: 7454 - protein, 19 aa, Homo sapiens
AVLDNPHHGFSNSGIMEER

SEQ ID NO: 7455 - protein, 16 aa, Homo sapiens
DREEILLQELEPVISR

SEQ ID NO: 7456 - protein, 13 aa, Homo sapiens
LLDAVVPFLPLQR

SEQ ID NO: 7457 - protein, 9 aa, Homo sapiens
SKAEELLSR

SEQ ID NO: 7458 - protein, 32 aa, Homo sapiens
NAGDTLPQEDLPLTKPEMFENPLYGSLSSFPK

SEQ ID NO: 7459 - protein, 11 aa, Homo sapiens
SPAVLHLQHSK

SEQ ID NO: 7460 - protein, 20 aa, Homo sapiens
SEINQQTPPTPTPRPPLPVK

SEQ ID NO: 7461 - protein, 18 aa, Homo sapiens
AIQDYLSTQLAQDSEFVK

SEQ ID NO: 7462 - protein, 12 aa, Homo sapiens
TPVSSQAPVPAK

SEQ ID NO: 7463 - protein, 14 aa, Homo sapiens
VDLPTWEAETIIQK

SEQ ID NO: 7464 - protein, 17 aa, Homo sapiens
SQEGENEEGSEGELVVK

SEQ ID NO: 7465 - protein, 15 aa, Homo sapiens
PQVPGEANPINMVSK

SEQ ID NO: 7466 - protein, 16 aa, Homo sapiens
ATETSRPSLSETLFQR

SEQ ID NO: 7467 - protein, 9 aa, Homo sapiens
LDQLIEFYK

SEQ ID NO: 7468 - protein, 13 aa, Homo sapiens
LFDQQLSPGLRPR

SEQ ID NO: 7469 - protein, 9 aa, Homo sapiens
YNLPSWCDR

SEQ ID NO: 7470 - protein, 17 aa, Homo sapiens
TLIVTHSNQALNQLFEK

SEQ ID NO: 7471 - protein, 15 aa, Homo sapiens
FQGQQNDYILLSLVR

SEQ ID NO: 7472 - protein, 9 aa, Homo sapiens
IFTQLEEFR

SEQ ID NO: 7473 - protein, 9 aa, Homo sapiens
IMALDIDER

SEQ ID NO: 7474 - protein, 8 aa, Homo sapiens
LESTYEIR

SEQ ID NO: 7475 - protein, 16 aa, Homo sapiens
PLHLHIIPTEPFPTTR

SEQ ID NO: 7476 - protein, 19 aa, Homo sapiens
TDVAVQIISNIYHNFPEQR

SEQ ID NO: 7477 - protein, 13 aa, Homo sapiens
VGVPTVDLDAQGR

SEQ ID NO: 7478 - protein, 20 aa, Homo sapiens
VSLFQNCFELTPAFSQLTAR

SEQ ID NO: 7479 - protein, 14 aa, Homo sapiens
VTVEDPALQIPPFR

SEQ ID NO: 7480 - protein, 11 aa, Homo sapiens
YSNMEQSLFTR

SEQ ID NO: 7481 - protein, 16 aa, Homo sapiens
SLDTTLQFPFKEPEKR

SEQ ID NO: 7482 - protein, 7 aa, Homo sapiens
NELGLPK

SEQ ID NO: 7483 - protein, 15 aa, Homo sapiens
SLDTTLQFPFKEPEK

SEQ ID NO: 7484 - protein, 10 aa, Homo sapiens
DLAQCVNEVK

SEQ ID NO: 7485 - protein, 8 aa, Homo sapiens
DRSELSLK

SEQ ID NO: 7486 - protein, 15 aa, Homo sapiens
EVNLRPQMSQFLCLK

SEQ ID NO: 7487 - protein, 7 aa, Homo sapiens
VHTHFLK

SEQ ID NO: 7488 - protein, 7 aa, Homo sapiens
YAFLLDK

SEQ ID NO: 7489 - protein, 9 aa, Homo sapiens
TFLSTCCEK

SEQ ID NO: 7490 - protein, 10 aa, Homo sapiens
YHLLLQELVK

SEQ ID NO: 7491 - protein, 17 aa, Homo sapiens
EALGTPGAANLYQVFIK

SEQ ID NO: 7492 - protein, 18 aa, Homo sapiens
YTDTLGSIQQHFLKPLQR

SEQ ID NO: 7493 - protein, 11 aa, Homo sapiens
LNPGDIVELTK

SEQ ID NO: 7494 - protein, 7 aa, Homo sapiens
ACQMLLR

SEQ ID NO: 7495 - protein, 11 aa, Homo sapiens
AEAEQNWWEGR

SEQ ID NO: 7496 - protein, 10 aa, Homo sapiens
AGAESILANR

SEQ ID NO: 7497 - protein, 11 aa, Homo sapiens
DFVNLHSFQVR

SEQ ID NO: 7498 - protein, 9 aa, Homo sapiens
DLLMVPMQR

SEQ ID NO: 7499 - protein, 8 aa, Homo sapiens
GTFYQGYR

SEQ ID NO: 7500 - protein, 9 aa, Homo sapiens
IMTAEGLYR

SEQ ID NO: 7501 - protein, 7 aa, Homo sapiens
LALDAMR

SEQ ID NO: 7502 - protein, 14 aa, Homo sapiens
NTSTNEIGWFPCNR

SEQ ID NO: 7503 - protein, 10 aa, Homo sapiens
QCTHWLIQCR

SEQ ID NO: 7504 - protein, 21 aa, Homo sapiens
QITNFQLSIENLDQSLAHYGR

SEQ ID NO: 7505 - protein, 8 aa, Homo sapiens
SDGTFLVR

SEQ ID NO: 7506 - protein, 17 aa, Homo sapiens
VIYTLSALSWTPIAQNR

SEQ ID NO: 7507 - protein, 16 aa, Homo sapiens
VTWDGAQVCELAQALR

SEQ ID NO: 7508 - protein, 10 aa, Homo sapiens
YCSQVESASK

SEQ ID NO: 7509 - protein, 20 aa, Homo sapiens
AVADLALIPDVDIDSDGVFK

SEQ ID NO: 7510 - protein, 15 aa, Homo sapiens
AKYPDYEVTWANDGY

SEQ ID NO: 7511 - protein, 21 aa, Homo sapiens
IHVYGYSMAYGPAQHAISTEK

SEQ ID NO: 7512 - protein, 11 aa, Homo sapiens
WAEYHADIYDK

SEQ ID NO: 7513 - protein, 12 aa, Homo sapiens
QGCDCECLGGGR

SEQ ID NO: 7514 - protein, 13 aa, Homo sapiens
YPDYEVTWANDGY

SEQ ID NO: 7515 - protein, 9 aa, Homo sapiens
SCFLCMVCK

SEQ ID NO: 7516 - protein, 17 aa, Homo sapiens
TVYFAEEVQCEGNSFHK

SEQ ID NO: 7517 - protein, 22 aa, Homo sapiens
GYGYGQGAGTLSTDKGESLGIK

SEQ ID NO: 7518 - protein, 17 aa, Homo sapiens
HEEAPGHRPTTNPNASK

SEQ ID NO: 7519 - protein, 17 aa, Homo sapiens
NLDSTTVAVHGEEIYCK

SEQ ID NO: 7520 - protein, 7 aa, Homo sapiens
PNWGGGK

SEQ ID NO: 7521 - protein, 15 aa, Homo sapiens
GYGYGQGAGTLSTDK

SEQ ID NO: 7522 - protein, 17 aa, Homo sapiens
GLESTTLADKDGEIYCK

SEQ ID NO: 7523 - protein, 18 aa, Homo sapiens
KNLDSTTVAVHGEEIYCK

SEQ ID NO: 7524 - protein, 10 aa, Homo sapiens
CSQAVYAAEK

SEQ ID NO: 7525 - protein, 10 aa, Homo sapiens
GLESTTLADK

SEQ ID NO: 7526 - protein, 15 aa, Homo sapiens
GFGFGQGAGALVHSE

SEQ ID NO: 7527 - protein, 22 aa, Homo sapiens
ETAHWKPPPWNDVDPPKDTIVK

SEQ ID NO: 7528 - protein, 21 aa, Homo sapiens
QWQPDVEWAQQFGGAVMYPSK

SEQ ID NO: 7529 - protein, 8 aa, Homo sapiens
IIAQCLNK

SEQ ID NO: 7530 - protein, 21 aa, Homo sapiens
PGGVHQDLPLGLMDDIYQFSK

SEQ ID NO: 7531 - protein, 12 aa, Homo sapiens
APGFAHLAGLDK

SEQ ID NO: 7532 - protein, 11 aa, Homo sapiens
TSMESLIHHFK

SEQ ID NO: 7533 - protein, 21 aa, Homo sapiens
LYTEGYQVPPGATYTAIEAPK

SEQ ID NO: 7534 - protein, 14 aa, Homo sapiens
GEFGVYLVSDGSSR

SEQ ID NO: 7535 - protein, 17 aa, Homo sapiens
GEFGVYLVSDGSSRPYR

SEQ ID NO: 7536 - protein, 9 aa, Homo sapiens
GSGIQWDLR

SEQ ID NO: 7537 - protein, 12 aa, Homo sapiens
LDELEELLTNNR

SEQ ID NO: 7538 - protein, 11 aa, Homo sapiens
LVMELSGEMVR

SEQ ID NO: 7539 - protein, 7 aa, Homo sapiens
MFEFYER

SEQ ID NO: 7540 - protein, 18 aa, Homo sapiens
NITLNFGPQHPAAHGVLR

SEQ ID NO: 7541 - protein, 19 aa, Homo sapiens
TQPYDVYDQVEFDVPVGSR

SEQ ID NO: 7542 - protein, 11 aa, Homo sapiens
TYLQALPYFDR

SEQ ID NO: 7543 - protein, 8 aa, Homo sapiens
VLFGEITR

SEQ ID NO: 7544 - protein, 16 aa, Homo sapiens
KFICHVVGITYQHIDR

SEQ ID NO: 7545 - protein, 16 aa, Homo sapiens
WLLAEMLGDLSDSQLK

SEQ ID NO: 7546 - protein, 14 aa, Homo sapiens
ALTNLPHTDFTLCK

SEQ ID NO: 7547 - protein, 14 aa, Homo sapiens
ENAYDLEANLAVLK

SEQ ID NO: 7548 - protein, 7 aa, Homo sapiens
AMFEQMR

SEQ ID NO: 7549 - protein, 14 aa, Homo sapiens
CMIDQAHQEERPIR

SEQ ID NO: 7550 - protein, 15 aa, Homo sapiens
FICHVVGITYQHIDR

SEQ ID NO: 7551 - protein, 14 aa, Homo sapiens
IDFDSVSSIMASSQ

SEQ ID NO: 7552 - protein, 11 aa, Homo sapiens
YNPENLATLER

SEQ ID NO: 7553 - protein, 8 aa, Homo sapiens
SMIEQLIK

SEQ ID NO: 7554 - protein, 19 aa, Homo sapiens
TLMEALVASYLIKPEVQVR

SEQ ID NO: 7555 - protein, 10 aa, Homo sapiens
GRPLDDIIDK

SEQ ID NO: 7556 - protein, 20 aa, Homo sapiens
ESTSEQMPSFPEMVYYIQEK

SEQ ID NO: 7557 - protein, 12 aa, Homo sapiens
SAGAMLKPHAPK

SEQ ID NO: 7558 - protein, 12 aa, Homo sapiens
SASPFNLAEKPK

SEQ ID NO: 7559 - protein, 15 aa, Homo sapiens
VNDVVPWVLDVILNK

SEQ ID NO: 7560 - protein, 12 aa, Homo sapiens
LYLQELITITQK

SEQ ID NO: 7561 - protein, 15 aa, Homo sapiens
TLMSSGQMAPSSSNK

SEQ ID NO: 7562 - protein, 8 aa, Homo sapiens
ALQSQSWK

SEQ ID NO: 7563 - protein, 15 aa, Homo sapiens
NGPLPIPSEGSGFTK

SEQ ID NO: 7564 - protein, 13 aa, Homo sapiens
FQEFSNIVIPLIK

SEQ ID NO: 7565 - protein, 11 aa, Homo sapiens
TPDGQGLSTYK

SEQ ID NO: 7566 - protein, 9 aa, Homo sapiens
ALSINTLVK

SEQ ID NO: 7567 - protein, 12 aa, Homo sapiens
TIAALLPCLLDK

SEQ ID NO: 7568 - protein, 12 aa, Homo sapiens
TEALSVIELLLK

SEQ ID NO: 7569 - protein, 17 aa, Homo sapiens
DAWQMTEEEYTPPAGAK

SEQ ID NO: 7570 - protein, 8 aa, Homo sapiens
FLPPVLLK

SEQ ID NO: 7571 - protein, 16 aa, Homo sapiens
ELQLEYLLGAFESLGK

SEQ ID NO: 7572 - protein, 9 aa, Homo sapiens
VYLGDIPLK

SEQ ID NO: 7573 - protein, 10 aa, Homo sapiens
LINEYKEDPK

SEQ ID NO: 7574 - protein, 17 aa, Homo sapiens
SVPNQPSTNEILQAVLK

SEQ ID NO: 7575 - protein, 16 aa, Homo sapiens
VIGDNPWTPEQLEQCK

SEQ ID NO: 7576 - protein, 14 aa, Homo sapiens
QSLIDWNNPAIINK

SEQ ID NO: 7577 - protein, 10 aa, Homo sapiens
EGAVLKPELK

SEQ ID NO: 7578 - protein, 12 aa, Homo sapiens
IVAISCAADILK

SEQ ID NO: 7579 - protein, 18 aa, Homo sapiens
EVLPLAFLGMHEIADEEK

SEQ ID NO: 7580 - protein, 13 aa, Homo sapiens
LLLQGLMDSVEAK

SEQ ID NO: 7581 - protein, 21 aa, Homo sapiens
VLLIESLATMEPDSRPELQEK

SEQ ID NO: 7582 - protein, 17 aa, Homo sapiens
ELCSLASDLSQPDLVYK

SEQ ID NO: 7583 - protein, 14 aa, Homo sapiens
QAMTSIWNALVTDK

SEQ ID NO: 7584 - protein, 19 aa, Homo sapiens
VKHEVSGETVVFQGGALGK

SEQ ID NO: 7585 - protein, 25 aa, Homo sapiens
SEKEECNLWTEVWQENVPGSFGGIR

SEQ ID NO: 7586 - protein, 19 aa, Homo sapiens
AIQTLGYFPVGDGDFPHQK

SEQ ID NO: 7587 - protein, 16 aa, Homo sapiens
LGHAETDEQLQNIISK

SEQ ID NO: 7588 - protein, 15 aa, Homo sapiens
AIACVVTACSAELEK

SEQ ID NO: 7589 - protein, 25 aa, Homo sapiens
QAAETFPANIQVVYDGLFGTNTNSK

SEQ ID NO: 7590 - protein, 9 aa, Homo sapiens
FVDKTEWIK

SEQ ID NO: 7591 - protein, 15 aa, Homo sapiens
AGEQLAPFLPQLVPR

SEQ ID NO: 7592 - protein, 14 aa, Homo sapiens
DIALVQQLFEALCK

SEQ ID NO: 7593 - protein, 12 aa, Homo sapiens
ESSCLALNDLLR

SEQ ID NO: 7594 - protein, 14 aa, Homo sapiens
FASTVFPSDHIPSR

SEQ ID NO: 7595 - protein, 14 aa, Homo sapiens
FMNLANHHAMWNSR

SEQ ID NO: 7596 - protein, 12 aa, Homo sapiens
GAAFGFNVIATR

SEQ ID NO: 7597 - protein, 10 aa, Homo sapiens
GMMSTVTEVR

SEQ ID NO: 7598 - protein, 10 aa, Homo sapiens
HIISPNPHVR

SEQ ID NO: 7599 - protein, 13 aa, Homo sapiens
KGAAFGFNVIATR

SEQ ID NO: 7600 - protein, 22 aa, Homo sapiens
LAIQEALSMMVGAYSTLEGAQR

SEQ ID NO: 7601 - protein, 10 aa, Homo sapiens
LHLVESLLSR

SEQ ID NO: 7602 - protein, 12 aa, Homo sapiens
LMSALLSGLTDR

SEQ ID NO: 7603 - protein, 10 aa, Homo sapiens
LPEIWETLFR

SEQ ID NO: 7604 - protein, 9 aa, Homo sapiens
LSSTQEGVR

SEQ ID NO: 7605 - protein, 9 aa, Homo sapiens
MSEQQDLER

SEQ ID NO: 7606 - protein, 9 aa, Homo sapiens
NSLESSGVR

SEQ ID NO: 7607 - protein, 12 aa, Homo sapiens
QAACIWLLSLVR

SEQ ID NO: 7608 - protein, 10 aa, Homo sapiens
QWECLTSECR

SEQ ID NO: 7609 - protein, 11 aa, Homo sapiens
SCAFAMGHLVR

SEQ ID NO: 7610 - protein, 12 aa, Homo sapiens
TSCALTIHAIGR

SEQ ID NO: 7611 - protein, 11 aa, Homo sapiens
YLLLLAAGDPR

SEQ ID NO: 7612 - protein, 10 aa, Homo sapiens
YQFDPNLGIR

SEQ ID NO: 7613 - protein, 20 aa, Homo sapiens
KVDPMAIVVFHQADIGEYVR

SEQ ID NO: 7614 - protein, 19 aa, Homo sapiens
VWIKPGAEQSFLYGNHVLK

SEQ ID NO: 7615 - protein, 14 aa, Homo sapiens
LHVTALDYLAPYAK

SEQ ID NO: 7616 - protein, 10 aa, Homo sapiens
LVSLGTCFGK

SEQ ID NO: 7617 - protein, 9 aa, Homo sapiens
LAANISGDK

SEQ ID NO: 7618 - protein, 28 aa, Homo sapiens
ITENTSQYQGVVVYSMADIPLGFGVAAK

SEQ ID NO: 7619 - protein, 10 aa, Homo sapiens
MRPLTEEETR

SEQ ID NO: 7620 - protein, 19 aa, Homo sapiens
VDPMAIVVFHQADIGEYVR

SEQ ID NO: 7621 - protein, 20 aa, Homo sapiens
YIGENLQLLVDRPDGTYCFR

SEQ ID NO: 7622 - protein, 11 aa, Homo sapiens
FEEQGASDLAK

SEQ ID NO: 7623 - protein, 20 aa, Homo sapiens
AMPLPEEVTQILEENSDLIR

SEQ ID NO: 7624 - protein, 16 aa, Homo sapiens
AVLPVAESFGFADEIR

SEQ ID NO: 7625 - protein, 16 aa, Homo sapiens
LLELFTDLSCNPEMMK

SEQ ID NO: 7626 - protein, 7 aa, Homo sapiens
IAAGIFK

SEQ ID NO: 7627 - protein, 19 aa, Homo sapiens
HAPGLIAALAYETANFYQK

SEQ ID NO: 7628 - protein, 11 aa, Homo sapiens
IPTEAPQLELK

SEQ ID NO: 7629 - protein, 15 aa, Homo sapiens
ADHTLSSLEPAYSAK

SEQ ID NO: 7630 - protein, 15 aa, Homo sapiens
GPGPTVKPSGHLFFR

SEQ ID NO: 7631 - protein, 17 aa, Homo sapiens
LYGGVCYAGIDTDPELK

SEQ ID NO: 7632 - protein, 11 aa, Homo sapiens
VYFFGSGQPEK

SEQ ID NO: 7633 - protein, 13 aa, Homo sapiens
VEVNTNSGEIIHK

SEQ ID NO: 7634 - protein, 18 aa, Homo sapiens
VVVDPVVTEQPSTSSAAK

SEQ ID NO: 7635 - protein, 15 aa, Homo sapiens
CPFVPQMGDEVYYFR

SEQ ID NO: 7636 - protein, 16 aa, Homo sapiens
FLEDGPCQQAAQVLIR

SEQ ID NO: 7637 - protein, 32 aa, Homo sapiens
GSALAALHCGRPPESPVNYGSPPSIADTLFSR

SEQ ID NO: 7638 - protein, 18 aa, Homo sapiens
GSISSTSEVHSPPNVGLR

SEQ ID NO: 7639 - protein, 7 aa, Homo sapiens
IYSMSLR

SEQ ID NO: 7640 - protein, 24 aa, Homo sapiens
LGPLLEQEIPQSVPGVQTLLGAGR

SEQ ID NO: 7641 - protein, 11 aa, Homo sapiens
SGEAVISNTSR

SEQ ID NO: 7642 - protein, 23 aa, Homo sapiens
GYDSAGVGFDGGNDKDWEANACK

SEQ ID NO: 7643 - protein, 11 aa, Homo sapiens
EVLSMDDEIQK

SEQ ID NO: 7644 - protein, 18 aa, Homo sapiens
VNFDDYTVNLGGLKDHIK

SEQ ID NO: 7645 - protein, 14 aa, Homo sapiens
AVQTLQMELQQIMK

SEQ ID NO: 7646 - protein, 7 aa, Homo sapiens
RLPDLIK

SEQ ID NO: 7647 - protein, 20 aa, Homo sapiens
ETDCGVHINAGPEIGVASTK

SEQ ID NO: 7648 - protein, 14 aa, Homo sapiens
VNFDDYTVNLGGLK

SEQ ID NO: 7649 - protein, 13 aa, Homo sapiens
GYHYATCLEGALK

SEQ ID NO: 7650 - protein, 9 aa, Homo sapiens
HGPLALVDK

SEQ ID NO: 7651 - protein, 9 aa, Homo sapiens
LATELYHQK

SEQ ID NO: 7652 - protein, 8 aa, Homo sapiens
ALDEEVHK

SEQ ID NO: 7653 - protein, 15 aa, Homo sapiens
GYDFESETDTETIAK

SEQ ID NO: 7654 - protein, 8 aa, Homo sapiens
EILETLIK

SEQ ID NO: 7655 - protein, 7 aa, Homo sapiens
EIMLGLK

SEQ ID NO: 7656 - protein, 17 aa, Homo sapiens
QGRPVVICDKEDTETIK

SEQ ID NO: 7657 - protein, 16 aa, Homo sapiens
EITYMHSEGILAGELK

SEQ ID NO: 7658 - protein, 9 aa, Homo sapiens
GNFSSFMQK

SEQ ID NO: 7659 - protein, 19 aa, Homo sapiens
AVEYYFASDASAVIEHTNR

SEQ ID NO: 7660 - protein, 11 aa, Homo sapiens
CQNALQQVVAR

SEQ ID NO: 7661 - protein, 21 aa, Homo sapiens
DDVCFFLSQSGETADTLMGLR

SEQ ID NO: 7662 - protein, 14 aa, Homo sapiens
EIFEQPESVVNTMR

SEQ ID NO: 7663 - protein, 13 aa, Homo sapiens
ESQDTSFTTLVER

SEQ ID NO: 7664 - protein, 17 aa, Homo sapiens
GALTVGITNTVGSSISR

SEQ ID NO: 7665 - protein, 9 aa, Homo sapiens
GSPLLIGVR

SEQ ID NO: 7666 - protein, 8 aa, Homo sapiens
GYDVDFPR

SEQ ID NO: 7667 - protein, 11 aa, Homo sapiens
LSTDHIPILYR

SEQ ID NO: 7668 - protein, 10 aa, Homo sapiens
RGSPLLIGVR

SEQ ID NO: 7669 - protein, 12 aa, Homo sapiens
SVHFPGQAVGTR

SEQ ID NO: 7670 - protein, 7 aa, Homo sapiens
SVLIMGR

SEQ ID NO: 7671 - protein, 16 aa, Homo sapiens
VIFLEDDDVAAVVDGR

SEQ ID NO: 7672 - protein, 16 aa, Homo sapiens
WATHGEPSPVNSHPQR

SEQ ID NO: 7673 - protein, 19 aa, Homo sapiens
GHTECVEALINQGASIFVK

SEQ ID NO: 7674 - protein, 14 aa, Homo sapiens
TNSGFEESDSGATK

SEQ ID NO: 7675 - protein, 10 aa, Homo sapiens
GANINAFDKK

SEQ ID NO: 7676 - protein, 9 aa, Homo sapiens
VVVEELLAK

SEQ ID NO: 7677 - protein, 9 aa, Homo sapiens
TALDLAAFK

SEQ ID NO: 7678 - protein, 13 aa, Homo sapiens
HSAPVNAVDNSGK

SEQ ID NO: 7679 - protein, 15 aa, Homo sapiens
LLLEIADNPEAVDVK

SEQ ID NO: 7680 - protein, 10 aa, Homo sapiens
IQDESLINEK

SEQ ID NO: 7681 - protein, 14 aa, Homo sapiens
DKDLNTPLHLACSK

SEQ ID NO: 7682 - protein, 11 aa, Homo sapiens
LLQSSGADFHK

SEQ ID NO: 7683 - protein, 13 aa, Homo sapiens
LLSSGFEIDTPDK

SEQ ID NO: 7684 - protein, 20 aa, Homo sapiens
LTDQPPLVQAIFSGDPEEIR

SEQ ID NO: 7685 - protein, 9 aa, Homo sapiens
QCLELLLER

SEQ ID NO: 7686 - protein, 11 aa, Homo sapiens
SPLHMTAVHGR

SEQ ID NO: 7687 - protein, 13 aa, Homo sapiens
TALHYAAASDMDR

SEQ ID NO: 7688 - protein, 15 aa, Homo sapiens
TILGNAHDNSEELER

SEQ ID NO: 7689 - protein, 29 aa, Homo sapiens
EAAAAAAAAVAAAAAAAAAAEPYPVSGAK

SEQ ID NO: 7690 - protein, 10 aa, Homo sapiens
GLYNEHTVDR

SEQ ID NO: 7691 - protein, 9 aa, Homo sapiens
QWEYCGQPK

SEQ ID NO: 7692 - protein, 7 aa, Homo sapiens
RNPEMLK

SEQ ID NO: 7693 - protein, 19 aa, Homo sapiens
THTDTESEASILGDSGEYK

SEQ ID NO: 7694 - protein, 14 aa, Homo sapiens
VAAQCSHAAVSAYK

SEQ ID NO: 7695 - protein, 15 aa, Homo sapiens
APDEETLIALLAHAK

SEQ ID NO: 7696 - protein, 8 aa, Homo sapiens
VCFGMLPK

SEQ ID NO: 7697 - protein, 23 aa, Homo sapiens
TQIAPGSQTVLGIGPGPADLIDK

SEQ ID NO: 7698 - protein, 14 aa, Homo sapiens
MLGLTVSLIQDAGR

SEQ ID NO: 7699 - protein, 16 aa, Homo sapiens
KFSNQETCVEIGESVR

SEQ ID NO: 7700 - protein, 20 aa, Homo sapiens
INNACFEAVVVTNTIPQEDK

SEQ ID NO: 7701 - protein, 21 aa, Homo sapiens
VAILVDDMADTCGTICHAADK

SEQ ID NO: 7702 - protein, 13 aa, Homo sapiens
IFSGSSHQDLSQK

SEQ ID NO: 7703 - protein, 13 aa, Homo sapiens
NCTIVSPDAGGAK

SEQ ID NO: 7704 - protein, 7 aa, Homo sapiens
LGLELGK

SEQ ID NO: 7705 - protein, 8 aa, Homo sapiens
MVLVGDVK

SEQ ID NO: 7706 - protein, 10 aa, Homo sapiens
LNVDFALIHK

SEQ ID NO: 7707 - protein, 7 aa, Homo sapiens
ENISEWR

SEQ ID NO: 7708 - protein, 15 aa, Homo sapiens
FSNQETCVEIGESVR

SEQ ID NO: 7709 - protein, 8 aa, Homo sapiens
LLSAGATR

SEQ ID NO: 7710 - protein, 8 aa, Homo sapiens
RVTSIADR

SEQ ID NO: 7711 - protein, 16 aa, Homo sapiens
THNGESVSYLFSHVPL

SEQ ID NO: 7712 - protein, 12 aa, Homo sapiens
VTAVIPCFPYAR

SEQ ID NO: 7713 - protein, 7 aa, Homo sapiens
VTSIADR

SEQ ID NO: 7714 - protein, 17 aa, Homo sapiens
VYAILTHGIFSGPAISR

SEQ ID NO: 7715 - protein, 12 aa, Homo sapiens
FAQVVLQDLDKK

SEQ ID NO: 7716 - protein, 22 aa, Homo sapiens
LIHEPSAALLAYGIGQDSPTGK

SEQ ID NO: 7717 - protein, 10 aa, Homo sapiens
YEIDTGEETK

SEQ ID NO: 7718 - protein, 11 aa, Homo sapiens
FELLCSPLFNK

SEQ ID NO: 7719 - protein, 8 aa, Homo sapiens
AAGFNVLR

SEQ ID NO: 7720 - protein, 14 aa, Homo sapiens
FTVLFPSGTPLPAR

SEQ ID NO: 7721 - protein, 28 aa, Homo sapiens
HSLSTLGSANCFLDSLYEGQDFDCNVSR

SEQ ID NO: 7722 - protein, 7 aa, Homo sapiens
SNILVFK

SEQ ID NO: 7723 - protein, 13 aa, Homo sapiens
TVIVTGANTGIGK

SEQ ID NO: 7724 - protein, 24 aa, Homo sapiens
SPELAAQPSTYLAVAEELADVSGK

SEQ ID NO: 7725 - protein, 13 aa, Homo sapiens
APAPEAEDEEVAR

SEQ ID NO: 7726 - protein, 11 aa, Homo sapiens
GETLNHHVNAR

SEQ ID NO: 7727 - protein, 17 aa, Homo sapiens
LQGSGVTVNALHPGVAR

SEQ ID NO: 7728 - protein, 10 aa, Homo sapiens
LVGLEAPSVR

SEQ ID NO: 7729 - protein, 8 aa, Homo sapiens
RLWAESAR

SEQ ID NO: 7730 - protein, 19 aa, Homo sapiens
NGMVEDWDSFQAILDHTYK

SEQ ID NO: 7731 - protein, 30 aa, Homo sapiens
STGLILDSGATHTTAIPVHDGYVLQQGIVK

SEQ ID NO: 7732 - protein, 14 aa, Homo sapiens
LKIPEGLFDPSNVK

SEQ ID NO: 7733 - protein, 14 aa, Homo sapiens
QGGPTYYIDTNALR

SEQ ID NO: 7734 - protein, 18 aa, Homo sapiens
SEASLHPVLMSEAPWNTR

SEQ ID NO: 7735 - protein, 13 aa, Homo sapiens
SPLAGDFITMQCR

SEQ ID NO: 7736 - protein, 13 aa, Homo sapiens
VDFPTAIGMVVER

SEQ ID NO: 7737 - protein, 8 aa, Homo sapiens
VFGGTVHK

SEQ ID NO: 7738 - protein, 11 aa, Homo sapiens
TLNMTTSPEEK

SEQ ID NO: 7739 - protein, 11 aa, Homo sapiens
VICAEEPYICK

SEQ ID NO: 7740 - protein, 13 aa, Homo sapiens
SGNIVAGIANESK

SEQ ID NO: 7741 - protein, 14 aa, Homo sapiens
VIEPLKDFHKDEVR

SEQ ID NO: 7742 - protein, 11 aa, Homo sapiens
SYSYVCGISSK

SEQ ID NO: 7743 - protein, 14 aa, Homo sapiens
EEVVLLTHGDSVDK

SEQ ID NO: 7744 - protein, 10 aa, Homo sapiens
VVYIFGPPVK

SEQ ID NO: 7745 - protein, 18 aa, Homo sapiens
GLQKEEVVLLTHGDSVDK

SEQ ID NO: 7746 - protein, 17 aa, Homo sapiens
LYGAQFHPEVGLTENGK

SEQ ID NO: 7747 - protein, 16 aa, Homo sapiens
IMYDLTSKPPGTTEWE

SEQ ID NO: 7748 - protein, 20 aa, Homo sapiens
ISQMPVILTPLHFDRDPLQK

SEQ ID NO: 7749 - protein, 11 aa, Homo sapiens
ESQSVEEALKK

SEQ ID NO: 7750 - protein, 17 aa, Homo sapiens
EDGVFNISVDNTCSLFR

SEQ ID NO: 7751 - protein, 11 aa, Homo sapiens
ELGLPEELVSR

SEQ ID NO: 7752 - protein, 20 aa, Homo sapiens
EPPTDVTPTFLTTGVLSTLR

SEQ ID NO: 7753 - protein, 11 aa, Homo sapiens
HPFPGPGLAIR

SEQ ID NO: 7754 - protein, 11 aa, Homo sapiens
QADFEAHNILR

SEQ ID NO: 7755 - protein, 10 aa, Homo sapiens
THHNDTELIR

SEQ ID NO: 7756 - protein, 20 aa, Homo sapiens
LLDLSWTESCKPTATEPLFK

SEQ ID NO: 7757 - protein, 19 aa, Homo sapiens
AGLQDASGNLVPLEDVHIK

SEQ ID NO: 7758 - protein, 12 aa, Homo sapiens
ALNENLQDTVEK

SEQ ID NO: 7759 - protein, 7 aa, Homo sapiens
HIVGEIK

SEQ ID NO: 7760 - protein, 12 aa, Homo sapiens
LELGNDWDSATK

SEQ ID NO: 7761 - protein, 8 aa, Homo sapiens
MDDASISR

SEQ ID NO: 7762 - protein, 16 aa, Homo sapiens
QLLGLQPISTVSPLHR

SEQ ID NO: 7763 - protein, 10 aa, Homo sapiens
SPVDVLQIFR

SEQ ID NO: 7764 - protein, 20 aa, Homo sapiens
TTPVDLCLLEESVGSLEGSR

SEQ ID NO: 7765 - protein, 9 aa, Homo sapiens
YLSLLYPAR

SEQ ID NO: 7766 - protein, 7 aa, Homo sapiens
KFDAIYK

SEQ ID NO: 7767 - protein, 14 aa, Homo sapiens
DGLDYILGALESGK

SEQ ID NO: 7768 - protein, 12 aa, Homo sapiens
TYNPFYAFLASK

SEQ ID NO: 7769 - protein, 11 aa, Homo sapiens
VVEFSELDKPR

SEQ ID NO: 7770 - protein, 14 aa, Homo sapiens
ALLAANEEEDREIR

SEQ ID NO: 7771 - protein, 13 aa, Homo sapiens
TAGPEQGPGLGGR

SEQ ID NO: 7772 - protein, 14 aa, Homo sapiens
VSWDSVLSAEQTGR

SEQ ID NO: 7773 - protein, 18 aa, Homo sapiens
FLSGSWSEFSTQPENFLK

SEQ ID NO: 7774 - protein, 25 aa, Homo sapiens
IYNLPPELYHEGEQVEYAEMVPVLR

SEQ ID NO: 7775 - protein, 12 aa, Homo sapiens
AITGIQAFTASK

SEQ ID NO: 7776 - protein, 17 aa, Homo sapiens
EIISEMGELGVLGPTIK

SEQ ID NO: 7777 - protein, 7 aa, Homo sapiens
YLPQLAK

SEQ ID NO: 7778 - protein, 37 aa, Homo sapiens
ASATGMIIMDGVEVPEENVLPGASSLGGPFGCLNNAR

SEQ ID NO: 7779 - protein, 33 aa, Homo sapiens
DMLGGNGISDEYHVIRGYGCAGVSSVAYGLLAR

SEQ ID NO: 7780 - protein, 24 aa, Homo sapiens
HAMNLEAVNTYEGTHDIHALILGR

SEQ ID NO: 7781 - protein, 9 aa, Homo sapiens
MQFGVPLAR

SEQ ID NO: 7782 - protein, 23 aa, Homo sapiens
SAMSVQSSLVMHPIYAYGSEEQR

SEQ ID NO: 7783 - protein, 15 aa, Homo sapiens
SGLGDDLVQALGLSK

SEQ ID NO: 7784 - protein, 10 aa, Homo sapiens
EIAEPLFDLK

SEQ ID NO: 7785 - protein, 13 aa, Homo sapiens
AALLNFDEFAVSK

SEQ ID NO: 7786 - protein, 7 aa, Homo sapiens
LQLWAFK

SEQ ID NO: 7787 - protein, 12 aa, Homo sapiens
FLENVAAAETEK

SEQ ID NO: 7788 - protein, 12 aa, Homo sapiens
EMLEGFYEEISK

SEQ ID NO: 7789 - protein, 28 aa, Homo sapiens
GPFPPPPPLPLAAPLPHSVPDSSALPTK

SEQ ID NO: 7790 - protein, 10 aa, Homo sapiens
AEPIWELPTR

SEQ ID NO: 7791 - protein, 19 aa, Homo sapiens
AETLAGAMPNEAGGHPDAR

SEQ ID NO: 7792 - protein, 20 aa, Homo sapiens
FGPCATLWASLDPVSVDTAR

SEQ ID NO: 7793 - protein, 24 aa, Homo sapiens
FSGVAGEAPSNPSVPVAVSSGPGR

SEQ ID NO: 7794 - protein, 11 aa, Homo sapiens
LAGGHGVSASR

SEQ ID NO: 7795 - protein, 11 aa, Homo sapiens
LLTMMPTEEER

SEQ ID NO: 7796 - protein, 13 aa, Homo sapiens
QLWDSPETAPAAR

SEQ ID NO: 7797 - protein, 22 aa, Homo sapiens
RAPTCSLDGALPLGAQIPAVHR

SEQ ID NO: 7798 - protein, 29 aa, Homo sapiens
TLAALPDQDSFYDVTDALEQQGMEALVQR

SEQ ID NO: 7799 - protein, 15 aa, Homo sapiens
VDFEQLTENLGQLER

SEQ ID NO: 7800 - protein, 15 aa, Homo sapiens
VGAAADHNYQSYILR

SEQ ID NO: 7801 - protein, 13 aa, Homo sapiens
VGMEQLVQNATFR

SEQ ID NO: 7802 - protein, 19 aa, Homo sapiens
VQYLEDTDPFACANFPEPR

SEQ ID NO: 7803 - protein, 8 aa, Homo sapiens
LIEGLPEK

SEQ ID NO: 7804 - protein, 10 aa, Homo sapiens
LWQTTEEIPK

SEQ ID NO: 7805 - protein, 13 aa, Homo sapiens
LSTKDPLPTIASR

SEQ ID NO: 7806 - protein, 8 aa, Homo sapiens
LLYGNDAK

SEQ ID NO: 7807 - protein, 16 aa, Homo sapiens
ETYCPVIVDNLIQLCK

SEQ ID NO: 7808 - protein, 9 aa, Homo sapiens
KSEPPPLDR

SEQ ID NO: 7809 - protein, 11 aa, Homo sapiens
SPPLHEHPLYK

SEQ ID NO: 7810 - protein, 17 aa, Homo sapiens
VVVEPVGPVGFKPETFR

SEQ ID NO: 7811 - protein, 22 aa, Homo sapiens
NDTGFQEGYPYPYPHTLYLLDK

SEQ ID NO: 7812 - protein, 15 aa, Homo sapiens
VYEIPGLEPITFAGK

SEQ ID NO: 7813 - protein, 11 aa, Homo sapiens
LWQTTEEIPKR

SEQ ID NO: 7814 - protein, 9 aa, Homo sapiens
DPLPTIASR

SEQ ID NO: 7815 - protein, 10 aa, Homo sapiens
DQACYIFHHR

SEQ ID NO: 7816 - protein, 8 aa, Homo sapiens
ESLLLQVR

SEQ ID NO: 7817 - protein, 9 aa, Homo sapiens
MHFVPWLAR

SEQ ID NO: 7818 - protein, 18 aa, Homo sapiens
NHIENQDECVLNVISHAR

SEQ ID NO: 7819 - protein, 16 aa, Homo sapiens
VLEQPVVVQSVGTDGR

SEQ ID NO: 7820 - protein, 7 aa, Homo sapiens
FGDFVLK

SEQ ID NO: 7821 - protein, 17 aa, Homo sapiens
ELLQLADALGPSICMLK

SEQ ID NO: 7822 - protein, 9 aa, Homo sapiens
MLEILEQQK

SEQ ID NO: 7823 - protein, 17 aa, Homo sapiens
AALGPLVTGLYDVQAFK

SEQ ID NO: 7824 - protein, 20 aa, Homo sapiens
IASWADLVNAHVVPGSGVVK

SEQ ID NO: 7825 - protein, 10 aa, Homo sapiens
KFADIGNTVK

SEQ ID NO: 7826 - protein, 9 aa, Homo sapiens
KQYEGGIFK

SEQ ID NO: 7827 - protein, 9 aa, Homo sapiens
AAWEAYLSR

SEQ ID NO: 7828 - protein, 16 aa, Homo sapiens
GIISAADRLEAAEMYR

SEQ ID NO: 7829 - protein, 7 aa, Homo sapiens
GIVSRPR

SEQ ID NO: 7830 - protein, 11 aa, Homo sapiens
GLQEVGLPLHR

SEQ ID NO: 7831 - protein, 9 aa, Homo sapiens
GSDIIIVGR

SEQ ID NO: 7832 - protein, 8 aa, Homo sapiens
LEAAEMYR

SEQ ID NO: 7833 - protein, 12 aa, Homo sapiens
SGLSSPIYIDLR

SEQ ID NO: 7834 - protein, 10 aa, Homo sapiens
VTDAIVLLDR

SEQ ID NO: 7835 - protein, 9 aa, Homo sapiens
DFVDLVLVK

SEQ ID NO: 7836 - protein, 16 aa, Homo sapiens
MDPALAAQMSEAVAEK

SEQ ID NO: 7837 - protein, 26 aa, Homo sapiens
YEDGTISSNATHVEHPLCPPKPGFVR

SEQ ID NO: 7838 - protein, 16 aa, Homo sapiens
SLEAEGFQVTYLPVQK

SEQ ID NO: 7839 - protein, 16 aa, Homo sapiens
EMSPLWEMVQDGIDLK

SEQ ID NO: 7840 - protein, 14 aa, Homo sapiens
AIGTDEDLAHSSIR

SEQ ID NO: 7841 - protein, 10 aa, Homo sapiens
HLITTQTEHK

SEQ ID NO: 7842 - protein, 12 aa, Homo sapiens
QQVASLIGADPR

SEQ ID NO: 7843 - protein, 14 aa, Homo sapiens
THAYGWESEAAMER

SEQ ID NO: 7844 - protein, 12 aa, Homo sapiens
VEALQSGGGQER

SEQ ID NO: 7845 - protein, 19 aa, Homo sapiens
VLDAMLPYLINYYGNPHSR

SEQ ID NO: 7846 - protein, 22 aa, Homo sapiens
VPMGSGQEAAVPVTWTEIFSGK

SEQ ID NO: 7847 - protein, 25 aa, Homo sapiens
GAPLVKPLPVNPTDPAVTGPDIFAK

SEQ ID NO: 7848 - protein, 27 aa, Homo sapiens
NHLPQDSQDLVLGGDVPISSIQATIAK

SEQ ID NO: 7849 - protein, 13 aa, Homo sapiens
AALPTPALSPEDK

SEQ ID NO: 7850 - protein, 17 aa, Homo sapiens
LVPMAAHEASSLYSEEK

SEQ ID NO: 7851 - protein, 21 aa, Homo sapiens
KDNDFIYHEAVPALDTLQPVK

SEQ ID NO: 7852 - protein, 10 aa, Homo sapiens
VAYFQSALDK

SEQ ID NO: 7853 - protein, 13 aa, Homo sapiens
ALENPDTASLLGR

SEQ ID NO: 7854 - protein, 10 aa, Homo sapiens
ASFTNSELHR

SEQ ID NO: 7855 - protein, 12 aa, Homo sapiens
DLLEEDELLEQK

SEQ ID NO: 7856 - protein, 8 aa, Homo sapiens
FCYEAVVR

SEQ ID NO: 7857 - protein, 14 aa, Homo sapiens
GQLGDVGALDTVWR

SEQ ID NO: 7858 - protein, 11 aa, Homo sapiens
HQDVMPYDSNR

SEQ ID NO: 7859 - protein, 10 aa, Homo sapiens
LLSGPLDQVR

SEQ ID NO: 7860 - protein, 17 aa, Homo sapiens
REESEAVEAGDPPEELR

SEQ ID NO: 7861 - protein, 7 aa, Homo sapiens
VAALLER

SEQ ID NO: 7862 - protein, 7 aa, Homo sapiens
VLSLQFR

SEQ ID NO: 7863 - protein, 8 aa, Homo sapiens
VSLEQQLR

SEQ ID NO: 7864 - protein, 11 aa, Homo sapiens
YLGQLHYLQSR

SEQ ID NO: 7865 - protein, 15 aa, Homo sapiens
NLVPLLLAPENLVEK

SEQ ID NO: 7866 - protein, 19 aa, Homo sapiens
SMLQATAEANNLAAVAGAR

SEQ ID NO: 7867 - protein, 15 aa, Homo sapiens
NGGNVLQMMYEKPER

SEQ ID NO: 7868 - protein, 13 aa, Homo sapiens
LKDAEKPVLFFER

SEQ ID NO: 7869 - protein, 8 aa, Homo sapiens
VKEFLSTL

SEQ ID NO: 7870 - protein, 8 aa, Homo sapiens
STFVNILK

SEQ ID NO: 7871 - protein, 19 aa, Homo sapiens
WCNVQSTQDEFEELTMSQK

SEQ ID NO: 7872 - protein, 11 aa, Homo sapiens
DAEKPVLFFER

SEQ ID NO: 7873 - protein, 11 aa, Homo sapiens
ISIEGNIAAGK

SEQ ID NO: 7874 - protein, 15 aa, Homo sapiens
GRNEEQGIPLEYLEK

SEQ ID NO: 7875 - protein, 13 aa, Homo sapiens
NEEQGIPLEYLEK

SEQ ID NO: 7876 - protein, 8 aa, Homo sapiens
HESWLLHR

SEQ ID NO: 7877 - protein, 15 aa, Homo sapiens
QLCEDWEVVPEPVAR

SEQ ID NO: 7878 - protein, 13 aa, Homo sapiens
SCPSFSASSEGTR

SEQ ID NO: 7879 - protein, 24 aa, Homo sapiens
VGSEVPGTVISFVTHPWDVSLVQK

SEQ ID NO: 7880 - protein, 16 aa, Homo sapiens
LLGQPSLDSLPIPAPR

SEQ ID NO: 7881 - protein, 10 aa, Homo sapiens
SPDEPLPVVR

SEQ ID NO: 7882 - protein, 11 aa, Homo sapiens
TLSYLLPLLQR

SEQ ID NO: 7883 - protein, 28 aa, Homo sapiens
VLHALQEAAPEVVQPTTVQSSTIPSLLR

SEQ ID NO: 7884 - protein, 21 aa, Homo sapiens
PAPQPPVPRPEHCEGAAAGLK

SEQ ID NO: 7885 - protein, 31 aa, Homo sapiens
KIYCVACQELDSDVDKDNPALNAQAALSQAR

SEQ ID NO: 7886 - protein, 17 aa, Homo sapiens
MLGETCADCGTILLQDK

SEQ ID NO: 7887 - protein, 30 aa, Homo sapiens
IYCVACQELDSDVDKDNPALNAQAALSQAR

SEQ ID NO: 7888 - protein, 15 aa, Homo sapiens
EHQLASASELPLGSR

SEQ ID NO: 7889 - protein, 8 aa, Homo sapiens
LMGDYLLR

SEQ ID NO: 7890 - protein, 7 aa, Homo sapiens
SLQQLQH

SEQ ID NO: 7891 - protein, 8 aa, Homo sapiens
NLGDQWHK

SEQ ID NO: 7892 - protein, 8 aa, Homo sapiens
FGGVVELR

SEQ ID NO: 7893 - protein, 8 aa, Homo sapiens
FIVIADFR

SEQ ID NO: 7894 - protein, 16 aa, Homo sapiens
GIPIEVIPMAYVPVSR

SEQ ID NO: 7895 - protein, 8 aa, Homo sapiens
IVAGYASR

SEQ ID NO: 7896 - protein, 17 aa, Homo sapiens
MIPGVVDTGLFINMAER

SEQ ID NO: 7897 - protein, 19 aa, Homo sapiens
NNQVLGIGSGSTIVHAVQR

SEQ ID NO: 7898 - protein, 19 aa, Homo sapiens
GDVEEDEAVPDSEQDIKPR

SEQ ID NO: 7899 - protein, 12 aa, Homo sapiens
EELLPHLLPLLK

SEQ ID NO: 7900 - protein, 20 aa, Homo sapiens
DQVGEDNWQQFSEQFPPLLK

SEQ ID NO: 7901 - protein, 15 aa, Homo sapiens
QECLNNIGDASSLIR

SEQ ID NO: 7902 - protein, 16 aa, Homo sapiens
GQTCVVHYTGMLEDGK

SEQ ID NO: 7903 - protein, 18 aa, Homo sapiens
RGQTCVVHYTGMLEDGKK

SEQ ID NO: 7904 - protein, 17 aa, Homo sapiens
RGQTCVVHYTGMLEDGK

SEQ ID NO: 7905 - protein, 17 aa, Homo sapiens
GQTCVVHYTGMLEDGKK

SEQ ID NO: 7906 - protein, 14 aa, Homo sapiens
GWEEGVAQMSVGQR

SEQ ID NO: 7907 - protein, 20 aa, Homo sapiens
KLIAEGPGETVLVAEEEAAR

SEQ ID NO: 7908 - protein, 18 aa, Homo sapiens
SEKPNWDYHAEIQAFGHR

SEQ ID NO: 7909 - protein, 7 aa, Homo sapiens
ELFEMWK

SEQ ID NO: 7910 - protein, 11 aa, Homo sapiens
LQENFSLDLLK

SEQ ID NO: 7911 - protein, 9 aa, Homo sapiens
KLYGFTENR

SEQ ID NO: 7912 - protein, 8 aa, Homo sapiens
EAVLLNLK

SEQ ID NO: 7913 - protein, 10 aa, Homo sapiens
TAFVNSCYIK

SEQ ID NO: 7914 - protein, 10 aa, Homo sapiens
DFLITQMTGK

SEQ ID NO: 7915 - protein, 14 aa, Homo sapiens
IINPMGLLVEELKK

SEQ ID NO: 7916 - protein, 19 aa, Homo sapiens
QSGGTTALPLYFVGLYCDK

SEQ ID NO: 7917 - protein, 13 aa, Homo sapiens
IINPMGLLVEELK

SEQ ID NO: 7918 - protein, 19 aa, Homo sapiens
LIAEGPGETVLVAEEEAAR

SEQ ID NO: 7919 - protein, 8 aa, Homo sapiens
LYGFTENR

SEQ ID NO: 7920 - protein, 17 aa, Homo sapiens
NLVDFLTGEEVVCHVAR

SEQ ID NO: 7921 - protein, 12 aa, Homo sapiens
FLGAPAKPPLVR

SEQ ID NO: 7922 - protein, 11 aa, Homo sapiens
TLVTSCFLVEK

SEQ ID NO: 7923 - protein, 8 aa, Homo sapiens
MCETLNLK

SEQ ID NO: 7924 - protein, 16 aa, Homo sapiens
FSDSEIGGITIAHVIR

SEQ ID NO: 7925 - protein, 23 aa, Homo sapiens
AANMIPAHDSPLAALAFDASGTK

SEQ ID NO: 7926 - protein, 16 aa, Homo sapiens
EKPPEEPTTWTGYFGK

SEQ ID NO: 7927 - protein, 13 aa, Homo sapiens
LDEDSEHPPMILR

SEQ ID NO: 7928 - protein, 21 aa, Homo sapiens
VLMASTSYLPSQVTEMFNQGR

SEQ ID NO: 7929 - protein, 12 aa, Homo sapiens
NTAELQPESGKR

SEQ ID NO: 7930 - protein, 8 aa, Homo sapiens
AIGDHFYK

SEQ ID NO: 7931 - protein, 18 aa, Homo sapiens
ELAQIAGRPTEDEDEKEK

SEQ ID NO: 7932 - protein, 18 aa, Homo sapiens
ALDMSYDHKPEDEVELAR

SEQ ID NO: 7933 - protein, 16 aa, Homo sapiens
NLPPEEQMISALPDIK

SEQ ID NO: 7934 - protein, 12 aa, Homo sapiens
ALEDAFLAIDAK

SEQ ID NO: 7935 - protein, 12 aa, Homo sapiens
ETPSQENGPTAK

SEQ ID NO: 7936 - protein, 11 aa, Homo sapiens
AYTGFSSNSER

SEQ ID NO: 7937 - protein, 17 aa, Homo sapiens
EEPGSDSGTTAVVALIR

SEQ ID NO: 7938 - protein, 14 aa, Homo sapiens
LPLPYGFSAMQGWR

SEQ ID NO: 7939 - protein, 25 aa, Homo sapiens
SGGGTGEEPGSQGLNGEAGPEDSTR

SEQ ID NO: 7940 - protein, 29 aa, Homo sapiens
VADEDDVDNEEAALLHEEATMTIEELLTR

SEQ ID NO: 7941 - protein, 14 aa, Homo sapiens
ELFESSTNNNKDTK

SEQ ID NO: 7942 - protein, 12 aa, Homo sapiens
LDKFNEVVSVLK

SEQ ID NO: 7943 - protein, 18 aa, Homo sapiens
TFLALINQVFPAEEDSKK

SEQ ID NO: 7944 - protein, 16 aa, Homo sapiens
QARPTYATAMLQSLLK

SEQ ID NO: 7945 - protein, 17 aa, Homo sapiens
QMELHPDKPPILLVAGK

SEQ ID NO: 7946 - protein, 12 aa, Homo sapiens
NLEISIDTLMAK

SEQ ID NO: 7947 - protein, 9 aa, Homo sapiens
FVEIHFNEK

SEQ ID NO: 7948 - protein, 16 aa, Homo sapiens
IPFIRPADQYKDPQSK

SEQ ID NO: 7949 - protein, 10 aa, Homo sapiens
VQWCSLSVIK

SEQ ID NO: 7950 - protein, 15 aa, Homo sapiens
SSVVGGFVSHYLLEK

SEQ ID NO: 7951 - protein, 21 aa, Homo sapiens
DVEDNCSLMYLNEATLLHNIK

SEQ ID NO: 7952 - protein, 11 aa, Homo sapiens
SDPDHLAELVK

SEQ ID NO: 7953 - protein, 13 aa, Homo sapiens
IGLDDEEKLDLFR

SEQ ID NO: 7954 - protein, 16 aa, Homo sapiens
HFAGAVCYETTQFVEK

SEQ ID NO: 7955 - protein, 9 aa, Homo sapiens
FAEFDQIMK

SEQ ID NO: 7956 - protein, 17 aa, Homo sapiens
AGSMKDPLLDDHGDFIR

SEQ ID NO: 7957 - protein, 10 aa, Homo sapiens
VMLTTAGGTK

SEQ ID NO: 7958 - protein, 11 aa, Homo sapiens
ASFHELYNMYK

SEQ ID NO: 7959 - protein, 15 aa, Homo sapiens
SLGTRPPHVFAIADK

SEQ ID NO: 7960 - protein, 13 aa, Homo sapiens
PTYATAMLQSLLK

SEQ ID NO: 7961 - protein, 11 aa, Homo sapiens
STMMTQEQIQK

SEQ ID NO: 7962 - protein, 11 aa, Homo sapiens
ILKEEQELYQK

SEQ ID NO: 7963 - protein, 15 aa, Homo sapiens
IVEANPLLEAFGNAK

SEQ ID NO: 7964 - protein, 10 aa, Homo sapiens
ETDKQILQNR

SEQ ID NO: 7965 - protein, 9 aa, Homo sapiens
FNEVVSVLK

SEQ ID NO: 7966 - protein, 9 aa, Homo sapiens
TQLNLLLDK

SEQ ID NO: 7967 - protein, 16 aa, Homo sapiens
QKEEESQQQAVLEQER

SEQ ID NO: 7968 - protein, 11 aa, Homo sapiens
SSEELLSALQK

SEQ ID NO: 7969 - protein, 9 aa, Homo sapiens
LSFISVGNK

SEQ ID NO: 7970 - protein, 23 aa, Homo sapiens
EGLGVNEVHYVDNQDCIDLIEAK

SEQ ID NO: 7971 - protein, 10 aa, Homo sapiens
ALGLNENDYK

SEQ ID NO: 7972 - protein, 17 aa, Homo sapiens
TFLALINQVFPAEEDSK

SEQ ID NO: 7973 - protein, 8 aa, Homo sapiens
GPAVLATK

SEQ ID NO: 7974 - protein, 14 aa, Homo sapiens
CGGIQYLQNAIESR

SEQ ID NO: 7975 - protein, 17 aa, Homo sapiens
DDMEMCELNLEETGLTR

SEQ ID NO: 7976 - protein, 12 aa, Homo sapiens
DPLLDDHGDFIR

SEQ ID NO: 7977 - protein, 7 aa, Homo sapiens
DRELALR

SEQ ID NO: 7978 - protein, 16 aa, Homo sapiens
DTINTSCDIELLAACR

SEQ ID NO: 7979 - protein, 20 aa, Homo sapiens
IAQSEAELISDEAQADLALR

SEQ ID NO: 7980 - protein, 11 aa, Homo sapiens
IQAEVEAQLAR

SEQ ID NO: 7981 - protein, 10 aa, Homo sapiens
LCAGASEDIR

SEQ ID NO: 7982 - protein, 10 aa, Homo sapiens
LHLSSPDNFR

SEQ ID NO: 7983 - protein, 8 aa, Homo sapiens
LQQFFNER

SEQ ID NO: 7984 - protein, 13 aa, Homo sapiens
LVGILDILDEENR

SEQ ID NO: 7985 - protein, 11 aa, Homo sapiens
NIRDDEGFIIR

SEQ ID NO: 7986 - protein, 17 aa, Homo sapiens
NNDALHMSLESLICESR

SEQ ID NO: 7987 - protein, 7 aa, Homo sapiens
NYHIFYR

SEQ ID NO: 7988 - protein, 8 aa, Homo sapiens
QFEEIWER

SEQ ID NO: 7989 - protein, 20 aa, Homo sapiens
SAQSLEYCAELLGLDQDDLR

SEQ ID NO: 7990 - protein, 8 aa, Homo sapiens
STGASFIR

SEQ ID NO: 7991 - protein, 17 aa, Homo sapiens
SVTDYAQQNPAAQIPAR

SEQ ID NO: 7992 - protein, 13 aa, Homo sapiens
TVYSHLFDHVVNR

SEQ ID NO: 7993 - protein, 9 aa, Homo sapiens
VNHWLTCSR

SEQ ID NO: 7994 - protein, 15 aa, Homo sapiens
YLTESYGTGQDIDDR

SEQ ID NO: 7995 - protein, 17 aa, Homo sapiens
DSGVGAGIDSYYEYLLK

SEQ ID NO: 7996 - protein, 12 aa, Homo sapiens
ATGDPYYLEVGK

SEQ ID NO: 7997 - protein, 12 aa, Homo sapiens
AVQIVSHPFFGR

SEQ ID NO: 7998 - protein, 10 aa, Homo sapiens
EGSIILDAIR

SEQ ID NO: 7999 - protein, 12 aa, Homo sapiens
FTGATIFEEYAR

SEQ ID NO: 8000 - protein, 11 aa, Homo sapiens
MDSFFLAEMFK

SEQ ID NO: 8001 - protein, 14 aa, Homo sapiens
KFLPGMAIGYSSSK

SEQ ID NO: 8002 - protein, 24 aa, Homo sapiens
TALKEDGVLCCQGECQWLHLDLIK

SEQ ID NO: 8003 - protein, 25 aa, Homo sapiens
QNQDAFDVIITDSSDPMGPAESLFK

SEQ ID NO: 8004 - protein, 8 aa, Homo sapiens
ESYYQLMK

SEQ ID NO: 8005 - protein, 21 aa, Homo sapiens
HPSVESVVQCEIDEDVIQVSK

SEQ ID NO: 8006 - protein, 24 aa, Homo sapiens
NPSTNFQEPVQPLTQQQVAQMQLK

SEQ ID NO: 8007 - protein, 13 aa, Homo sapiens
LTLHVGDGFEFMK

SEQ ID NO: 8008 - protein, 14 aa, Homo sapiens
KVLIIGGGDGGVLR

SEQ ID NO: 8009 - protein, 13 aa, Homo sapiens
FLPGMAIGYSSSK

SEQ ID NO: 8010 - protein, 10 aa, Homo sapiens
AAFVLPEFAR

SEQ ID NO: 8011 - protein, 21 aa, Homo sapiens
DEFSYQEMIANLPLCSHPNPR

SEQ ID NO: 8012 - protein, 17 aa, Homo sapiens
MEPGPDGPAASGPAAIR

SEQ ID NO: 8013 - protein, 17 aa, Homo sapiens
TYGNVLVLDGVIQCTER

SEQ ID NO: 8014 - protein, 13 aa, Homo sapiens
VLIIGGGDGGVLR

SEQ ID NO: 8015 - protein, 8 aa, Homo sapiens
YQDILVFR

SEQ ID NO: 8016 - protein, 8 aa, Homo sapiens
YYNSDVHR

SEQ ID NO: 8017 - protein, 17 aa, Homo sapiens
GSLDPESIFEMMETGKR

SEQ ID NO: 8018 - protein, 10 aa, Homo sapiens
ASVTLSEAEK

SEQ ID NO: 8019 - protein, 16 aa, Homo sapiens
GSLDPESIFEMMETGK

SEQ ID NO: 8020 - protein, 14 aa, Homo sapiens
LSVENVPCIVTLCK

SEQ ID NO: 8021 - protein, 26 aa, Homo sapiens
LEKPNEGYLEFFVDCSASATPEFEGR

SEQ ID NO: 8022 - protein, 15 aa, Homo sapiens
GGDDLGTEIANTLYR

SEQ ID NO: 8023 - protein, 7 aa, Homo sapiens
TLCISPR

SEQ ID NO: 8024 - protein, 12 aa, Homo sapiens
VYIVHGVQEDLR

SEQ ID NO: 8025 - protein, 12 aa, Homo sapiens
FEPVHFVASSSK

SEQ ID NO: 8026 - protein, 14 aa, Homo sapiens
CQNIYLTTGYAGSK

SEQ ID NO: 8027 - protein, 15 aa, Homo sapiens
VFLQDHCLAEGYGTK

SEQ ID NO: 8028 - protein, 12 aa, Homo sapiens
SGEGIREPISVK

SEQ ID NO: 8029 - protein, 11 aa, Homo sapiens
TNPEYIYAPLK

SEQ ID NO: 8030 - protein, 10 aa, Homo sapiens
EDNIGNQLLR

SEQ ID NO: 8031 - protein, 9 aa, Homo sapiens
EGLGLDVER

SEQ ID NO: 8032 - protein, 13 aa, Homo sapiens
EVNEQTHFASMPR

SEQ ID NO: 8033 - protein, 11 aa, Homo sapiens
LLTDGYACEVR

SEQ ID NO: 8034 - protein, 11 aa, Homo sapiens
SESHTDLTFSR

SEQ ID NO: 8035 - protein, 15 aa, Homo sapiens
FVTDIDELGKDLLLK

SEQ ID NO: 8036 - protein, 10 aa, Homo sapiens
FVTDIDELGK

SEQ ID NO: 8037 - protein, 16 aa, Homo sapiens
DLKPQNILVTSSGQIK

SEQ ID NO: 8038 - protein, 18 aa, Homo sapiens
ADQQYECVAEIGEGAYGK

SEQ ID NO: 8039 - protein, 10 aa, Homo sapiens
GSSDVDQLGK

SEQ ID NO: 8040 - protein, 8 aa, Homo sapiens
DMMFQLLR

SEQ ID NO: 8041 - protein, 12 aa, Homo sapiens
HLETFEHPNVVR

SEQ ID NO: 8042 - protein, 15 aa, Homo sapiens
ILDVIGLPGEEDWPR

SEQ ID NO: 8043 - protein, 17 aa, Homo sapiens
ISAYSALSHPYFQDLER

SEQ ID NO: 8044 - protein, 9 aa, Homo sapiens
LFDVCTVSR

SEQ ID NO: 8045 - protein, 12 aa, Homo sapiens
VPEPGVPTETIK

SEQ ID NO: 8046 - protein, 14 aa, Homo sapiens
VQTGEEGMPLSTIR

SEQ ID NO: 8047 - protein, 19 aa, Homo sapiens
EGADMLMVKPGMPYLDIVR

SEQ ID NO: 8048 - protein, 10 aa, Homo sapiens
LAEVALAYAK

SEQ ID NO: 8049 - protein, 11 aa, Homo sapiens
EALMAHGLGNR

SEQ ID NO: 8050 - protein, 10 aa, Homo sapiens
FASCFYGPFR

SEQ ID NO: 8051 - protein, 17 aa, Homo sapiens
MQPQSVLHSGYFHPLLR

SEQ ID NO: 8052 - protein, 15 aa, Homo sapiens
RLEEMLRPLVEEGLR

SEQ ID NO: 8053 - protein, 14 aa, Homo sapiens
EKELSIHFVPGSCR

SEQ ID NO: 8054 - protein, 13 aa, Homo sapiens
GTFHWSGNEQMTK

SEQ ID NO: 8055 - protein, 13 aa, Homo sapiens
EEDIPAPLNLYGK

SEQ ID NO: 8056 - protein, 25 aa, Homo sapiens
RPDVVENQPDAASQLNVDASGNLAK

SEQ ID NO: 8057 - protein, 11 aa, Homo sapiens
ESLWPFLIDKR

SEQ ID NO: 8058 - protein, 10 aa, Homo sapiens
IPILYGEVEK

SEQ ID NO: 8059 - protein, 10 aa, Homo sapiens
ESLWPFLIDK

SEQ ID NO: 8060 - protein, 12 aa, Homo sapiens
LEESAVTVMFDK

SEQ ID NO: 8061 - protein, 13 aa, Homo sapiens
AVLENNLGAAVLR

SEQ ID NO: 8062 - protein, 15 aa, Homo sapiens
EFQQNNWHAVGCGFR

SEQ ID NO: 8063 - protein, 12 aa, Homo sapiens
ELSIHFVPGSCR

SEQ ID NO: 8064 - protein, 9 aa, Homo sapiens
LETLGIGQR

SEQ ID NO: 8065 - protein, 11 aa, Homo sapiens
LVEEEVNIPNR

SEQ ID NO: 8066 - protein, 12 aa, Homo sapiens
LVEEEVNIPNRR

SEQ ID NO: 8067 - protein, 10 aa, Homo sapiens
SANMDHWQQR

SEQ ID NO: 8068 - protein, 12 aa, Homo sapiens
VLVTGATGLLGR

SEQ ID NO: 8069 - protein, 31 aa, Homo sapiens
YEMACAIADAFNLPSSHLRPITDSPVLGAQR

SEQ ID NO: 8070 - protein, 30 aa, Homo sapiens
SGTTSQPEAAPTQAKPLPMEQFQVIQSFLR

SEQ ID NO: 8071 - protein, 13 aa, Homo sapiens
ALGSILAYLTDAK

SEQ ID NO: 8072 - protein, 19 aa, Homo sapiens
WPGPPVAPDQLETLEAQLK

SEQ ID NO: 8073 - protein, 11 aa, Homo sapiens
ADEDFVSYTPR

SEQ ID NO: 8074 - protein, 16 aa, Homo sapiens
DPGTGFVFSCLSGQGR

SEQ ID NO: 8075 - protein, 12 aa, Homo sapiens
EEDFDQLLEALR

SEQ ID NO: 8076 - protein, 10 aa, Homo sapiens
IPMPDFCAPR

SEQ ID NO: 8077 - protein, 14 aa, Homo sapiens
LSDNTPEHYLVQGR

SEQ ID NO: 8078 - protein, 17 aa, Homo sapiens
GMSIDQALAQLEFNDKK

SEQ ID NO: 8079 - protein, 16 aa, Homo sapiens
GMSIDQALAQLEFNDK

SEQ ID NO: 8080 - protein, 8 aa, Homo sapiens
VYCHYFVK

SEQ ID NO: 8081 - protein, 13 aa, Homo sapiens
LVEGPPPPPEPPK

SEQ ID NO: 8082 - protein, 7 aa, Homo sapiens
DHNVEFR

SEQ ID NO: 8083 - protein, 12 aa, Homo sapiens
EVLLEAQDMAVR

SEQ ID NO: 8084 - protein, 12 aa, Homo sapiens
IVYPPQLPGEPR

SEQ ID NO: 8085 - protein, 9 aa, Homo sapiens
RPAEIYHCR

SEQ ID NO: 8086 - protein, 12 aa, Homo sapiens
SNLYIAESTSGR

SEQ ID NO: 8087 - protein, 17 aa, Homo sapiens
QELPFMATENIIMAMVK

SEQ ID NO: 8088 - protein, 18 aa, Homo sapiens
FLEEEVYPLLKPYESVMK

SEQ ID NO: 8089 - protein, 9 aa, Homo sapiens
NALDLLLPK

SEQ ID NO: 8090 - protein, 21 aa, Homo sapiens
ASLPTLGFTHFQPAQLTTVGK

SEQ ID NO: 8091 - protein, 11 aa, Homo sapiens
VLSQQAASVVK

SEQ ID NO: 8092 - protein, 9 aa, Homo sapiens
SNLENIDFK

SEQ ID NO: 8093 - protein, 13 aa, Homo sapiens
AAGGDHGSPDSYR

SEQ ID NO: 8094 - protein, 11 aa, Homo sapiens
AFIITGQTYTR

SEQ ID NO: 8095 - protein, 11 aa, Homo sapiens
QEGGDNDLIER

SEQ ID NO: 8096 - protein, 13 aa, Homo sapiens
YASPEMCFVFSDR

SEQ ID NO: 8097 - protein, 8 aa, Homo sapiens
ISPAALKK

SEQ ID NO: 8098 - protein, 10 aa, Homo sapiens
KLMAFQPAPK

SEQ ID NO: 8099 - protein, 18 aa, Homo sapiens
VKLESPTVSTLTPSSPGK

SEQ ID NO: 8100 - protein, 13 aa, Homo sapiens
MLLDSEQHPCQLK

SEQ ID NO: 8101 - protein, 12 aa, Homo sapiens
GFTAAGILSAHK

SEQ ID NO: 8102 - protein, 10 aa, Homo sapiens
ELQSMADQEK

SEQ ID NO: 8103 - protein, 16 aa, Homo sapiens
LESPTVSTLTPSSPGK

SEQ ID NO: 8104 - protein, 9 aa, Homo sapiens
LMAFQPAPK

SEQ ID NO: 8105 - protein, 15 aa, Homo sapiens
LAIQLGAQALLGAAK

SEQ ID NO: 8106 - protein, 8 aa, Homo sapiens
KMGVNLTR

SEQ ID NO: 8107 - protein, 23 aa, Homo sapiens
DNVCSPGGATIHALHFLESGGFR

SEQ ID NO: 8108 - protein, 17 aa, Homo sapiens
IIASSPEMNLPTVSALR

SEQ ID NO: 8109 - protein, 7 aa, Homo sapiens
MGVNLTR

SEQ ID NO: 8110 - protein, 13 aa, Homo sapiens
SLLINAVEASCIR

SEQ ID NO: 8111 - protein, 16 aa, Homo sapiens
SVGFIGAGQLAYALAR

SEQ ID NO: 8112 - protein, 10 aa, Homo sapiens
LPHASSKPPR

SEQ ID NO: 8113 - protein, 10 aa, Homo sapiens
VSSSYPVEPK

SEQ ID NO: 8114 - protein, 21 aa, Homo sapiens
LSTPDVVSPFGTPFGSSVMNR

SEQ ID NO: 8115 - protein, 21 aa, Homo sapiens
MAGIFDVNTCYGSPQSPQLIR

SEQ ID NO: 8116 - protein, 16 aa, Homo sapiens
GEVAPDAKSFVLNLGK

SEQ ID NO: 8117 - protein, 12 aa, Homo sapiens
LPDGYEFKFPNR

SEQ ID NO: 8118 - protein, 18 aa, Homo sapiens
LNLEAINYMAADGDFKIK

SEQ ID NO: 8119 - protein, 15 aa, Homo sapiens
FNAHGDANTIVCNSK

SEQ ID NO: 8120 - protein, 18 aa, Homo sapiens
ACGLVASNLNLKPGECLR

SEQ ID NO: 8121 - protein, 20 aa, Homo sapiens
SFVLNLGKDSNNLCLHFNPR

SEQ ID NO: 8122 - protein, 10 aa, Homo sapiens
VRGEVAPDAK

SEQ ID NO: 8123 - protein, 12 aa, Homo sapiens
ACGLVASNLNLK

SEQ ID NO: 8124 - protein, 16 aa, Homo sapiens
LNLEAINYMAADGDFK

SEQ ID NO: 8125 - protein, 8 aa, Homo sapiens
SFVLNLGK

SEQ ID NO: 8126 - protein, 8 aa, Homo sapiens
LPDGYEFK

SEQ ID NO: 8127 - protein, 26 aa, Homo sapiens
EAVFPFQPGSVAEVCITFDQANLTVK

SEQ ID NO: 8128 - protein, 25 aa, Homo sapiens
FNAHGDANTIVCNSKDGGAWGTEQR

SEQ ID NO: 8129 - protein, 10 aa, Homo sapiens
DGGAWGTEQR

SEQ ID NO: 8130 - protein, 12 aa, Homo sapiens
DSNNLCLHFNPR

SEQ ID NO: 8131 - protein, 7 aa, Homo sapiens
ELMQWYK

SEQ ID NO: 8132 - protein, 7 aa, Homo sapiens
DYETVVK

SEQ ID NO: 8133 - protein, 12 aa, Homo sapiens
GVSCQFGPDVTK

SEQ ID NO: 8134 - protein, 10 aa, Homo sapiens
LSTLVETTLK

SEQ ID NO: 8135 - protein, 19 aa, Homo sapiens
GNHETDNMNQIYGFEGEVK

SEQ ID NO: 8136 - protein, 7 aa, Homo sapiens
VTISFMK

SEQ ID NO: 8137 - protein, 13 aa, Homo sapiens
AFLEENNLDYIIR

SEQ ID NO: 8138 - protein, 19 aa, Homo sapiens
FYSQAIELNPSNAIYYGNR

SEQ ID NO: 8139 - protein, 11 aa, Homo sapiens
LLYPDHFHLLR

SEQ ID NO: 8140 - protein, 13 aa, Homo sapiens
TECYGYALGDATR

SEQ ID NO: 8141 - protein, 16 aa, Homo sapiens
NHPESYHSYMWNNFFK

SEQ ID NO: 8142 - protein, 10 aa, Homo sapiens
IIQFKPGQDR

SEQ ID NO: 8143 - protein, 16 aa, Homo sapiens
LVILDNYDLASEWAAK

SEQ ID NO: 8144 - protein, 9 aa, Homo sapiens
LVDPLFSMK

SEQ ID NO: 8145 - protein, 12 aa, Homo sapiens
TLAMDTILANAK

SEQ ID NO: 8146 - protein, 14 aa, Homo sapiens
ITVLLDEVAEDMGK

SEQ ID NO: 8147 - protein, 9 aa, Homo sapiens
AVLAGQFVK

SEQ ID NO: 8148 - protein, 13 aa, Homo sapiens
GTPEETGSYLVSK

SEQ ID NO: 8149 - protein, 18 aa, Homo sapiens
ALTDPIQGTEYSAESLVR

SEQ ID NO: 8150 - protein, 14 aa, Homo sapiens
APLVDVYELTNLLR

SEQ ID NO: 8151 - protein, 13 aa, Homo sapiens
ETGLNVFLLDMCR

SEQ ID NO: 8152 - protein, 8 aa, Homo sapiens
LAELAGSR

SEQ ID NO: 8153 - protein, 12 aa, Homo sapiens
LSELLDQAPEGR

SEQ ID NO: 8154 - protein, 12 aa, Homo sapiens
NAVDEFLLLLDK

SEQ ID NO: 8155 - protein, 18 aa, Homo sapiens
SNVPVETTDEIPFSFSDR

SEQ ID NO: 8156 - protein, 13 aa, Homo sapiens
VVSLLDLTEYEMR

SEQ ID NO: 8157 - protein, 11 aa, Homo sapiens
SRPELLEYYIK

SEQ ID NO: 8158 - protein, 17 aa, Homo sapiens
KSEIQTLKEEIEQSLTK

SEQ ID NO: 8159 - protein, 11 aa, Homo sapiens
KPPPVPALPSK

SEQ ID NO: 8160 - protein, 11 aa, Homo sapiens
VILDYNTAHNK

SEQ ID NO: 8161 - protein, 17 aa, Homo sapiens
ASAPSPNAQVACDHCLK

SEQ ID NO: 8162 - protein, 13 aa, Homo sapiens
NSASWCVEWFNTK

SEQ ID NO: 8163 - protein, 17 aa, Homo sapiens
GISTKPVYIPEVELNHK

SEQ ID NO: 8164 - protein, 10 aa, Homo sapiens
FDTIYQILLK

SEQ ID NO: 8165 - protein, 13 aa, Homo sapiens
KVEQLQQEYTEMK

SEQ ID NO: 8166 - protein, 16 aa, Homo sapiens
SEIQTLKEEIEQSLTK

SEQ ID NO: 8167 - protein, 14 aa, Homo sapiens
FTYCSQVLGLHCYK

SEQ ID NO: 8168 - protein, 10 aa, Homo sapiens
GIHQSTIDLK

SEQ ID NO: 8169 - protein, 12 aa, Homo sapiens
ALLDASETTSTR

SEQ ID NO: 8170 - protein, 15 aa, Homo sapiens
NNFCGVGICYGSMNR

SEQ ID NO: 8171 - protein, 18 aa, Homo sapiens
NTVLCNVVEQFLQADLAR

SEQ ID NO: 8172 - protein, 19 aa, Homo sapiens
TCSPASLSQASADLEATLR

SEQ ID NO: 8173 - protein, 25 aa, Homo sapiens
VALSECYTVASVAEMPQNYRPHPQR

SEQ ID NO: 8174 - protein, 12 aa, Homo sapiens
AKEIIAQINTLK

SEQ ID NO: 8175 - protein, 11 aa, Homo sapiens
HYRPPEGTYGK

SEQ ID NO: 8176 - protein, 8 aa, Homo sapiens
TLAILADK

SEQ ID NO: 8177 - protein, 14 aa, Homo sapiens
SSLQVDWHEEEWEK

SEQ ID NO: 8178 - protein, 20 aa, Homo sapiens
LLANSIHGLNAARPDYIASK

SEQ ID NO: 8179 - protein, 13 aa, Homo sapiens
KLEFVPTNLHIQR

SEQ ID NO: 8180 - protein, 20 aa, Homo sapiens
KPNSFVAVSVTTPPQAFWTK

SEQ ID NO: 8181 - protein, 27 aa, Homo sapiens
VQDDGGSDQNYDIVTIGAPAAHCQGFK

SEQ ID NO: 8182 - protein, 7 aa, Homo sapiens
LSVYDVK

SEQ ID NO: 8183 - protein, 9 aa, Homo sapiens
LNSYFEQFK

SEQ ID NO: 8184 - protein, 14 aa, Homo sapiens
ASPTSTEEEQVMLR

SEQ ID NO: 8185 - protein, 9 aa, Homo sapiens
EIQSGMLLR

SEQ ID NO: 8186 - protein, 10 aa, Homo sapiens
EVLPEDCLPR

SEQ ID NO: 8187 - protein, 17 aa, Homo sapiens
FGDTSLQEVINVESLVR

SEQ ID NO: 8188 - protein, 10 aa, Homo sapiens
FPTTDGNHLR

SEQ ID NO: 8189 - protein, 18 aa, Homo sapiens
HTSSGCQSIIYIPQDVVR

SEQ ID NO: 8190 - protein, 16 aa, Homo sapiens
ILEQMAESVLSLHVPR

SEQ ID NO: 8191 - protein, 9 aa, Homo sapiens
LLLEEDAAR

SEQ ID NO: 8192 - protein, 16 aa, Homo sapiens
MVLPVDESLTEALGIR

SEQ ID NO: 8193 - protein, 10 aa, Homo sapiens
NCLHDDGFLR

SEQ ID NO: 8194 - protein, 9 aa, Homo sapiens
NDQDTLMAR

SEQ ID NO: 8195 - protein, 13 aa, Homo sapiens
NVDILWQAAEICR

SEQ ID NO: 8196 - protein, 24 aa, Homo sapiens
QIVTQYQTIILTYQENLTDLHQYR

SEQ ID NO: 8197 - protein, 8 aa, Homo sapiens
SLECIIQR

SEQ ID NO: 8198 - protein, 9 aa, Homo sapiens
TQVSYYAER

SEQ ID NO: 8199 - protein, 18 aa, Homo sapiens
VCELEELGELSPCWESLR

SEQ ID NO: 8200 - protein, 13 aa, Homo sapiens
VPLPGPLFDALPR

SEQ ID NO: 8201 - protein, 19 aa, Homo sapiens
VQPVLFNVGINEQQTLAER

SEQ ID NO: 8202 - protein, 20 aa, Homo sapiens
VTQATSSASADMLPVITGNR

SEQ ID NO: 8203 - protein, 11 aa, Homo sapiens
DEQQISAAVEK

SEQ ID NO: 8204 - protein, 17 aa, Homo sapiens
KVDIIADAAYSIFQKPK

SEQ ID NO: 8205 - protein, 15 aa, Homo sapiens
KVESTGAVPEFKEEK

SEQ ID NO: 8206 - protein, 10 aa, Homo sapiens
DGANIVIAAK

SEQ ID NO: 8207 - protein, 19 aa, Homo sapiens
VAHILNISPPLNLNPVWFK

SEQ ID NO: 8208 - protein, 12 aa, Homo sapiens
KVESTGAVPEFK

SEQ ID NO: 8209 - protein, 9 aa, Homo sapiens
ALPCIVDVR

SEQ ID NO: 8210 - protein, 13 aa, Homo sapiens
LAGCTVFITGASR

SEQ ID NO: 8211 - protein, 11 aa, Homo sapiens
RLDLMMNVNTR

SEQ ID NO: 8212 - protein, 21 aa, Homo sapiens
TAIHTAAMDMLGGPGIESQCR

SEQ ID NO: 8213 - protein, 14 aa, Homo sapiens
GGGDLPNSQEALQK

SEQ ID NO: 8214 - protein, 16 aa, Homo sapiens
LSDVTLVPVSCSELEK

SEQ ID NO: 8215 - protein, 23 aa, Homo sapiens
GVPESLASGEGAGAGLPALDLAK

SEQ ID NO: 8216 - protein, 12 aa, Homo sapiens
TVVAGSSDAAQK

SEQ ID NO: 8217 - protein, 16 aa, Homo sapiens
DFAVSTVPVSGPSHLR

SEQ ID NO: 8218 - protein, 21 aa, Homo sapiens
IVEIGDENATLDGTDVLFTGR

SEQ ID NO: 8219 - protein, 11 aa, Homo sapiens
LGNTTVICGVK

SEQ ID NO: 8220 - protein, 21 aa, Homo sapiens
NVQLPEVTINEETALAEVNLK

SEQ ID NO: 8221 - protein, 13 aa, Homo sapiens
AEFAAPSTDAPDK

SEQ ID NO: 8222 - protein, 27 aa, Homo sapiens
SGPPGEEAQVASQFIADVIENSQIIQK

SEQ ID NO: 8223 - protein, 9 aa, Homo sapiens
TVEPLEYYR

SEQ ID NO: 8224 - protein, 9 aa, Homo sapiens
AVVISGAGK

SEQ ID NO: 8225 - protein, 19 aa, Homo sapiens
MFTAGIDLMDMASDILQPK

SEQ ID NO: 8226 - protein, 12 aa, Homo sapiens
HVLHVQLNRPNK

SEQ ID NO: 8227 - protein, 27 aa, Homo sapiens
LTGSSAQEEASGVALGEAPDHSYESLR

SEQ ID NO: 8228 - protein, 10 aa, Homo sapiens
LPVGKEEEVK

SEQ ID NO: 8229 - protein, 9 aa, Homo sapiens
TTTVIFYPK

SEQ ID NO: 8230 - protein, 16 aa, Homo sapiens
NLVPEEADEHLFALEK

SEQ ID NO: 8231 - protein, 9 aa, Homo sapiens
FWQGSTDHR

SEQ ID NO: 8232 - protein, 10 aa, Homo sapiens
LVGYITNYSR

SEQ ID NO: 8233 - protein, 13 aa, Homo sapiens
NTEYLFELANSIR

SEQ ID NO: 8234 - protein, 18 aa, Homo sapiens
VVTLVEDPAGCVWGVAYR

SEQ ID NO: 8235 - protein, 7 aa, Homo sapiens
SLLNKPK

SEQ ID NO: 8236 - protein, 29 aa, Homo sapiens
SEMTPEELQKREEEEFNTGPLSVLTQSVK

SEQ ID NO: 8237 - protein, 10 aa, Homo sapiens
HCNMVLENVK

SEQ ID NO: 8238 - protein, 10 aa, Homo sapiens
SEMTPEELQK

SEQ ID NO: 8239 - protein, 19 aa, Homo sapiens
REEEEFNTGPLSVLTQSVK

SEQ ID NO: 8240 - protein, 7 aa, Homo sapiens
NPLIAGK

SEQ ID NO: 8241 - protein, 8 aa, Homo sapiens
EMWTEVPK

SEQ ID NO: 8242 - protein, 18 aa, Homo sapiens
EEEEFNTGPLSVLTQSVK

SEQ ID NO: 8243 - protein, 9 aa, Homo sapiens
GDSVIVVLR

SEQ ID NO: 8244 - protein, 10 aa, Homo sapiens
NNTQVLINCR

SEQ ID NO: 8245 - protein, 18 aa, Homo sapiens
VSAMCSHSSGAVNQDHSK

SEQ ID NO: 8246 - protein, 13 aa, Homo sapiens
CIMAGSIGSSFPR

SEQ ID NO: 8247 - protein, 23 aa, Homo sapiens
GFFQVGSDLHLIEPLDEGGEGGR

SEQ ID NO: 8248 - protein, 30 aa, Homo sapiens
HAVYQAEHLLQTAGTCGVSDDSLGSLLGPR

SEQ ID NO: 8249 - protein, 22 aa, Homo sapiens
RPPPAPPVTVSSPPFPVPVYTR

SEQ ID NO: 8250 - protein, 8 aa, Homo sapiens
TAAVFRPR

SEQ ID NO: 8251 - protein, 14 aa, Homo sapiens
AQPFVAAANIDDKR

SEQ ID NO: 8252 - protein, 19 aa, Homo sapiens
INLESEPQEFKPIGTAHNR

SEQ ID NO: 8253 - protein, 31 aa, Homo sapiens
AAAANLCPGDVILAIDGFGTESMTHADAQDR

SEQ ID NO: 8254 - protein, 15 aa, Homo sapiens
LSGGIDFNQPLVITR

SEQ ID NO: 8255 - protein, 13 aa, Homo sapiens
MLHDNRNEPTQPR

SEQ ID NO: 8256 - protein, 28 aa, Homo sapiens
QVVSASYNSPIGLYSTSNIQDALHGQLR

SEQ ID NO: 8257 - protein, 18 aa, Homo sapiens
VLQGMVDDGSDDRPAGTR

SEQ ID NO: 8258 - protein, 9 aa, Homo sapiens
WPGDILAYK

SEQ ID NO: 8259 - protein, 11 aa, Homo sapiens
YGLIGLNGIGK

SEQ ID NO: 8260 - protein, 9 aa, Homo sapiens
ELEDFEMKK

SEQ ID NO: 8261 - protein, 11 aa, Homo sapiens
TRLELEENQMK

SEQ ID NO: 8262 - protein, 12 aa, Homo sapiens
FHWEQDQIAHMK

SEQ ID NO: 8263 - protein, 11 aa, Homo sapiens
YYTGNYDQYVK

SEQ ID NO: 8264 - protein, 12 aa, Homo sapiens
LEELDADKAEMR

SEQ ID NO: 8265 - protein, 14 aa, Homo sapiens
IPPPVIMVQNVSFK

SEQ ID NO: 8266 - protein, 10 aa, Homo sapiens
ETTEVDLLTK

SEQ ID NO: 8267 - protein, 9 aa, Homo sapiens
LELEENQMK

SEQ ID NO: 8268 - protein, 11 aa, Homo sapiens
TLSFYFPPCGK

SEQ ID NO: 8269 - protein, 14 aa, Homo sapiens
LIQQVAQEIWVCEK

SEQ ID NO: 8270 - protein, 9 aa, Homo sapiens
SMLLSAIGK

SEQ ID NO: 8271 - protein, 7 aa, Homo sapiens
MPSDLAK

SEQ ID NO: 8272 - protein, 7 aa, Homo sapiens
DFSGGWR

SEQ ID NO: 8273 - protein, 15 aa, Homo sapiens
EVPIPEHIDIYHLTR

SEQ ID NO: 8274 - protein, 13 aa, Homo sapiens
ILHGLGFTPAMQR

SEQ ID NO: 8275 - protein, 7 aa, Homo sapiens
LELNSGR

SEQ ID NO: 8276 - protein, 14 aa, Homo sapiens
LLTGELLPTDGMIR

SEQ ID NO: 8277 - protein, 7 aa, Homo sapiens
LMELYER

SEQ ID NO: 8278 - protein, 9 aa, Homo sapiens
MMASGLTER

SEQ ID NO: 8279 - protein, 13 aa, Homo sapiens
TPLHCVMEVDTER

SEQ ID NO: 8280 - protein, 16 aa, Homo sapiens
TKPADMVIEAYGHGQR

SEQ ID NO: 8281 - protein, 17 aa, Homo sapiens
LMAVPNLFMLETVDSVK

SEQ ID NO: 8282 - protein, 11 aa, Homo sapiens
LADKVNSSWQR

SEQ ID NO: 8283 - protein, 18 aa, Homo sapiens
HGLPPSETIAIVEHINAK

SEQ ID NO: 8284 - protein, 13 aa, Homo sapiens
TFGENYVQELLEK

SEQ ID NO: 8285 - protein, 9 aa, Homo sapiens
WHFIGHLQK

SEQ ID NO: 8286 - protein, 9 aa, Homo sapiens
ILSLCPEIK

SEQ ID NO: 8287 - protein, 9 aa, Homo sapiens
APLEVAQEH

SEQ ID NO: 8288 - protein, 9 aa, Homo sapiens
IGSTIFGER

SEQ ID NO: 8289 - protein, 7 aa, Homo sapiens
VNSSWQR

SEQ ID NO: 8290 - protein, 8 aa, Homo sapiens
INLNCTQK

SEQ ID NO: 8291 - protein, 23 aa, Homo sapiens
VGIYSPHTAYDAAPQGVNNWLAK

SEQ ID NO: 8292 - protein, 13 aa, Homo sapiens
VEFNVNYTQDLDK

SEQ ID NO: 8293 - protein, 18 aa, Homo sapiens
TEILSLEKPLLLHTGMGR

SEQ ID NO: 8294 - protein, 11 aa, Homo sapiens
ALMQVVDFLSR

SEQ ID NO: 8295 - protein, 11 aa, Homo sapiens
APNYPTEGNHR

SEQ ID NO: 8296 - protein, 16 aa, Homo sapiens
INIILSETDRDPLQVV

SEQ ID NO: 8297 - protein, 16 aa, Homo sapiens
LCTLDESVSLATMIDR

SEQ ID NO: 8298 - protein, 13 aa, Homo sapiens
YFFDFLDAQAENK

SEQ ID NO: 8299 - protein, 11 aa, Homo sapiens
TNQALQVFYIK

SEQ ID NO: 8300 - protein, 19 aa, Homo sapiens
DLPPLSSSEMEEFLTQESK

SEQ ID NO: 8301 - protein, 14 aa, Homo sapiens
TVLFLGTGDGQLLK

SEQ ID NO: 8302 - protein, 18 aa, Homo sapiens
EGAAGLGGLLLTGWTFDR

SEQ ID NO: 8303 - protein, 11 aa, Homo sapiens
SPTTTALCLFR

SEQ ID NO: 8304 - protein, 14 aa, Homo sapiens
VQDTYLDCGTLQYR

SEQ ID NO: 8305 - protein, 25 aa, Homo sapiens
VMQVVDEKLPGLLGNFPGPFEEEMK

SEQ ID NO: 8306 - protein, 8 aa, Homo sapiens
VMQVVDEK

SEQ ID NO: 8307 - protein, 10 aa, Homo sapiens
TKSPFEQHIK

SEQ ID NO: 8308 - protein, 19 aa, Homo sapiens
AIQDGTIVLMGTYDDGATK

SEQ ID NO: 8309 - protein, 9 aa, Homo sapiens
DNWVFCGGK

SEQ ID NO: 8310 - protein, 13 aa, Homo sapiens
ICLEDNVLMSGVK

SEQ ID NO: 8311 - protein, 8 aa, Homo sapiens
SPFEQHIK

SEQ ID NO: 8312 - protein, 12 aa, Homo sapiens
MASGAANVVGPK

SEQ ID NO: 8313 - protein, 8 aa, Homo sapiens
TGEVLDTK

SEQ ID NO: 8314 - protein, 16 aa, Homo sapiens
LIADLGSTSITNLGFR

SEQ ID NO: 8315 - protein, 11 aa, Homo sapiens
MDASLGNLFAR

SEQ ID NO: 8316 - protein, 17 aa, Homo sapiens
RLIADLGSTSITNLGFR

SEQ ID NO: 8317 - protein, 8 aa, Homo sapiens
SALDTAAR

SEQ ID NO: 8318 - protein, 17 aa, Homo sapiens
YFDMWGGDVAPFIEFLK

SEQ ID NO: 8319 - protein, 16 aa, Homo sapiens
MLLPNILLTGTPGVGK

SEQ ID NO: 8320 - protein, 17 aa, Homo sapiens
EGGVIVDYHGCDFFPER

SEQ ID NO: 8321 - protein, 9 aa, Homo sapiens
TDTNVLYER

SEQ ID NO: 8322 - protein, 10 aa, Homo sapiens
VVDELDNQMR

SEQ ID NO: 8323 - protein, 23 aa, Homo sapiens
ITSENPDEGFKPSSGTVQELNFR

SEQ ID NO: 8324 - protein, 7 aa, Homo sapiens
LPELLLK

SEQ ID NO: 8325 - protein, 14 aa, Homo sapiens
IGSFGPQEDLLFLR

SEQ ID NO: 8326 - protein, 26 aa, Homo sapiens
TLEENKEEEGSEPPKAETQEGEPIAK

SEQ ID NO: 8327 - protein, 14 aa, Homo sapiens
VLYVGGLAEEVDDK

SEQ ID NO: 8328 - protein, 10 aa, Homo sapiens
KFDDENFILK

SEQ ID NO: 8329 - protein, 9 aa, Homo sapiens
FDDENFILK

SEQ ID NO: 8330 - protein, 15 aa, Homo sapiens
HVVFGEVTEGLDVLR

SEQ ID NO: 8331 - protein, 10 aa, Homo sapiens
VIIADCGEYV

SEQ ID NO: 8332 - protein, 18 aa, Homo sapiens
NGPVEGAFSVYSDFLLYK

SEQ ID NO: 8333 - protein, 8 aa, Homo sapiens
DIMAEIYK

SEQ ID NO: 8334 - protein, 11 aa, Homo sapiens
ICEPGYSPTYK

SEQ ID NO: 8335 - protein, 14 aa, Homo sapiens
HYGYNSYSVSNSEK

SEQ ID NO: 8336 - protein, 10 aa, Homo sapiens
EQWPQCPTIK

SEQ ID NO: 8337 - protein, 15 aa, Homo sapiens
GLVSGGLYESHVGCR

SEQ ID NO: 8338 - protein, 17 aa, Homo sapiens
GQDHCGIESEVVAGIPR

SEQ ID NO: 8339 - protein, 18 aa, Homo sapiens
SGVYQHVTGEMMGGHAIR

SEQ ID NO: 8340 - protein, 10 aa, Homo sapiens
ALCDLGPWVK

SEQ ID NO: 8341 - protein, 11 aa, Homo sapiens
GFGLLGSIFGK

SEQ ID NO: 8342 - protein, 9 aa, Homo sapiens
LVYLNEAWK

SEQ ID NO: 8343 - protein, 8 aa, Homo sapiens
CSAALASR

SEQ ID NO: 8344 - protein, 19 aa, Homo sapiens
YAVCAAGILLSIYAYHVER

SEQ ID NO: 8345 - protein, 13 aa, Homo sapiens
ESSPPEKEEAQEK

SEQ ID NO: 8346 - protein, 23 aa, Homo sapiens
ENSIEILSSTIKPYNAEDNENFK

SEQ ID NO: 8347 - protein, 16 aa, Homo sapiens
AQESVGIYEVTHQFVK

SEQ ID NO: 8348 - protein, 8 aa, Homo sapiens
LMDSVALK

SEQ ID NO: 8349 - protein, 17 aa, Homo sapiens
ATLENITNLRPVGEDFR

SEQ ID NO: 8350 - protein, 10 aa, Homo sapiens
CGNCGEISDK

SEQ ID NO: 8351 - protein, 10 aa, Homo sapiens
VCNLIDSGTK

SEQ ID NO: 8352 - protein, 10 aa, Homo sapiens
VPGATMLLAK

SEQ ID NO: 8353 - protein, 10 aa, Homo sapiens
QGIQFYTQLK

SEQ ID NO: 8354 - protein, 20 aa, Homo sapiens
VNAGDQPGADLGPLITPQAK

SEQ ID NO: 8355 - protein, 9 aa, Homo sapiens
AISFVGSNK

SEQ ID NO: 8356 - protein, 18 aa, Homo sapiens
SDKWIDIHNPATNEVIGR

SEQ ID NO: 8357 - protein, 25 aa, Homo sapiens
TITSQWKEEDATLSSPAVVMPTMGR

SEQ ID NO: 8358 - protein, 7 aa, Homo sapiens
ILQVSSK

SEQ ID NO: 8359 - protein, 13 aa, Homo sapiens
AFPAWADTSVLSR

SEQ ID NO: 8360 - protein, 8 aa, Homo sapiens
DMDLYSYR

SEQ ID NO: 8361 - protein, 10 aa, Homo sapiens
EGASILLDGR

SEQ ID NO: 8362 - protein, 11 aa, Homo sapiens
TLADAEGDVFR

SEQ ID NO: 8363 - protein, 10 aa, Homo sapiens
IQDGLGELKK

SEQ ID NO: 8364 - protein, 9 aa, Homo sapiens
KCEQVLIEK

SEQ ID NO: 8365 - protein, 10 aa, Homo sapiens
YIEDKDVFQK

SEQ ID NO: 8366 - protein, 23 aa, Homo sapiens
LLVLEDENANVDEVELKPDTLIK

SEQ ID NO: 8367 - protein, 18 aa, Homo sapiens
LVHQNSASDDAEASMISK

SEQ ID NO: 8368 - protein, 12 aa, Homo sapiens
DGEDLMDESVLK

SEQ ID NO: 8369 - protein, 23 aa, Homo sapiens
HLEIFHTEFQNLLDADKNEDLGR

SEQ ID NO: 8370 - protein, 16 aa, Homo sapiens
ESTEFLQQNPVTEYMK

SEQ ID NO: 8371 - protein, 12 aa, Homo sapiens
VDGEKDTYSYLA

SEQ ID NO: 8372 - protein, 21 aa, Homo sapiens
YNALVMSAFNNDAGFVAALDK

SEQ ID NO: 8373 - protein, 9 aa, Homo sapiens
AGIQQVYTR

SEQ ID NO: 8374 - protein, 13 aa, Homo sapiens
ESFESQFLADTER

SEQ ID NO: 8375 - protein, 8 aa, Homo sapiens
FTAFYASR

SEQ ID NO: 8376 - protein, 16 aa, Homo sapiens
GQTPGGAQFVGLELYK

SEQ ID NO: 8377 - protein, 15 aa, Homo sapiens
HQQLLGEVLTQLSSR

SEQ ID NO: 8378 - protein, 7 aa, Homo sapiens
MYNLVSR

SEQ ID NO: 8379 - protein, 12 aa, Homo sapiens
QIGLDQIWDDLR

SEQ ID NO: 8380 - protein, 7 aa, Homo sapiens
SPELLAR

SEQ ID NO: 8381 - protein, 9 aa, Homo sapiens
FWTAMFSDK

SEQ ID NO: 8382 - protein, 12 aa, Homo sapiens
VMEPILQILQQK

SEQ ID NO: 8383 - protein, 17 aa, Homo sapiens
SILPSNLLTVCQEGTLK

SEQ ID NO: 8384 - protein, 12 aa, Homo sapiens
VFDAFLNMMADK

SEQ ID NO: 8385 - protein, 12 aa, Homo sapiens
DFLVIPSPVLVK

SEQ ID NO: 8386 - protein, 14 aa, Homo sapiens
IYSTAFDYFSCPPK

SEQ ID NO: 8387 - protein, 13 aa, Homo sapiens
SQLLAHQFIWNMK

SEQ ID NO: 8388 - protein, 21 aa, Homo sapiens
VQPGCYLPSNPEAIVLDIDYK

SEQ ID NO: 8389 - protein, 9 aa, Homo sapiens
FGLFSAEIK

SEQ ID NO: 8390 - protein, 12 aa, Homo sapiens
LTDEMVMIMGGK

SEQ ID NO: 8391 - protein, 19 aa, Homo sapiens
EIHDFVLEQFNTSQGELQK

SEQ ID NO: 8392 - protein, 14 aa, Homo sapiens
LDPGAVSDVPEAIK

SEQ ID NO: 8393 - protein, 14 aa, Homo sapiens
HAQFLLVNFNHIHK

SEQ ID NO: 8394 - protein, 9 aa, Homo sapiens
SHLQEYLNK

SEQ ID NO: 8395 - protein, 9 aa, Homo sapiens
IHNELSPLK

SEQ ID NO: 8396 - protein, 20 aa, Homo sapiens
ASSSAGNLGVLIPVIAVLTR

SEQ ID NO: 8397 - protein, 12 aa, Homo sapiens
DYSNFMASLNLR

SEQ ID NO: 8398 - protein, 10 aa, Homo sapiens
EFNIPLEMLR

SEQ ID NO: 8399 - protein, 13 aa, Homo sapiens
FPVVVHSVTPSLR

SEQ ID NO: 8400 - protein, 8 aa, Homo sapiens
HVAAIGPR

SEQ ID NO: 8401 - protein, 9 aa, Homo sapiens
ISWQAAIFK

SEQ ID NO: 8402 - protein, 12 aa, Homo sapiens
MMVQDLHSALDR

SEQ ID NO: 8403 - protein, 13 aa, Homo sapiens
NDTVTPAELSELR

SEQ ID NO: 8404 - protein, 11 aa, Homo sapiens
NTEAIGNEVTR

SEQ ID NO: 8405 - protein, 12 aa, Homo sapiens
QTDFGMYDYFTR

SEQ ID NO: 8406 - protein, 14 aa, Homo sapiens
QYGDESTLAFQQAR

SEQ ID NO: 8407 - protein, 10 aa, Homo sapiens
SNLDITVGSR

SEQ ID NO: 8408 - protein, 13 aa, Homo sapiens
TLLLSLLATEIER

SEQ ID NO: 8409 - protein, 9 aa, Homo sapiens
VLEELEGVR

SEQ ID NO: 8410 - protein, 10 aa, Homo sapiens
YAGEVYGMIR

SEQ ID NO: 8411 - protein, 11 aa, Homo sapiens
YAIPCLIGISR

SEQ ID NO: 8412 - protein, 16 aa, Homo sapiens
YLTASQLVPPDNQDTR

SEQ ID NO: 8413 - protein, 11 aa, Homo sapiens
RPLWEEESNAK

SEQ ID NO: 8414 - protein, 15 aa, Homo sapiens
SLPGATAAECASNLK

SEQ ID NO: 8415 - protein, 13 aa, Homo sapiens
DCLYEVFDDLESK

SEQ ID NO: 8416 - protein, 16 aa, Homo sapiens
VISYGDDYADLPEYFK

SEQ ID NO: 8417 - protein, 10 aa, Homo sapiens
SDLEHFMLVR

SEQ ID NO: 8418 - protein, 16 aa, Homo sapiens
GAFTFQGSMIDMPLLK

SEQ ID NO: 8419 - protein, 13 aa, Homo sapiens
VESPEEIQWFADK

SEQ ID NO: 8420 - protein, 20 aa, Homo sapiens
VNSVSSGLAEEDLETLLQSR

SEQ ID NO: 8421 - protein, 13 aa, Homo sapiens
QLILSCLLNICQK

SEQ ID NO: 8422 - protein, 23 aa, Homo sapiens
HQLASISSPVVTSLLINLGSPVK

SEQ ID NO: 8423 - protein, 13 aa, Homo sapiens
AQHSENDLEEVGK

SEQ ID NO: 8424 - protein, 7 aa, Homo sapiens
VFSLLQK

SEQ ID NO: 8425 - protein, 21 aa, Homo sapiens
FCSVLWTYGSSLSNPLNCSVK

SEQ ID NO: 8426 - protein, 9 aa, Homo sapiens
EGVDESFIK

SEQ ID NO: 8427 - protein, 11 aa, Homo sapiens
VHLEDVFQLFK

SEQ ID NO: 8428 - protein, 8 aa, Homo sapiens
NVEEIVVK

SEQ ID NO: 8429 - protein, 21 aa, Homo sapiens
NTSELVSSEVYLLSALAALQK

SEQ ID NO: 8430 - protein, 7 aa, Homo sapiens
VLLPAIK

SEQ ID NO: 8431 - protein, 14 aa, Homo sapiens
LLTFYNLADCIAEK

SEQ ID NO: 8432 - protein, 19 aa, Homo sapiens
EPTAVLKDEAMVLHLTLGK

SEQ ID NO: 8433 - protein, 8 aa, Homo sapiens
HLEAILTK

SEQ ID NO: 8434 - protein, 11 aa, Homo sapiens
VVESGGPEILK

SEQ ID NO: 8435 - protein, 10 aa, Homo sapiens
AKPLGTVQQK

SEQ ID NO: 8436 - protein, 11 aa, Homo sapiens
DEVASLLFDPK

SEQ ID NO: 8437 - protein, 19 aa, Homo sapiens
MIELLADNINLGDPSSMLK

SEQ ID NO: 8438 - protein, 10 aa, Homo sapiens
MLFDLLVNCK

SEQ ID NO: 8439 - protein, 15 aa, Homo sapiens
NLLSCVYSCPSYIAK

SEQ ID NO: 8440 - protein, 16 aa, Homo sapiens
ELYAGMPTIQITALEK

SEQ ID NO: 8441 - protein, 19 aa, Homo sapiens
SESQEEMLQVFNVETHTSK

SEQ ID NO: 8442 - protein, 8 aa, Homo sapiens
LQQNISWK

SEQ ID NO: 8443 - protein, 13 aa, Homo sapiens
ITKPFFAAISDEK

SEQ ID NO: 8444 - protein, 14 aa, Homo sapiens
TDEAFFDSENDPEK

SEQ ID NO: 8445 - protein, 11 aa, Homo sapiens
GWEEALENVIK

SEQ ID NO: 8446 - protein, 9 aa, Homo sapiens
GTLITHCYK

SEQ ID NO: 8447 - protein, 8 aa, Homo sapiens
ALDLLNNK

SEQ ID NO: 8448 - protein, 12 aa, Homo sapiens
LDDTYSFQVINK

SEQ ID NO: 8449 - protein, 8 aa, Homo sapiens
LIGVANQK

SEQ ID NO: 8450 - protein, 14 aa, Homo sapiens
YNEFSVSLLNEDPK

SEQ ID NO: 8451 - protein, 11 aa, Homo sapiens
LPEEKEETIPK

SEQ ID NO: 8452 - protein, 12 aa, Homo sapiens
LSEVTFRPLFFK

SEQ ID NO: 8453 - protein, 11 aa, Homo sapiens
TLDVVLEEHLK

SEQ ID NO: 8454 - protein, 12 aa, Homo sapiens
DGLSCLIVLLQR

SEQ ID NO: 8455 - protein, 9 aa, Homo sapiens
ETHFPFAIR

SEQ ID NO: 8456 - protein, 19 aa, Homo sapiens
GIPVELWAHYVEELNSTQR

SEQ ID NO: 8457 - protein, 14 aa, Homo sapiens
ITSEMGSASQANIR

SEQ ID NO: 8458 - protein, 13 aa, Homo sapiens
LALPQSDASLLSR

SEQ ID NO: 8459 - protein, 11 aa, Homo sapiens
LVPDLLAIVQR

SEQ ID NO: 8460 - protein, 19 aa, Homo sapiens
MVIPALIQSDSGDSIEVSR

SEQ ID NO: 8461 - protein, 11 aa, Homo sapiens
SGICSLHPLLR

SEQ ID NO: 8462 - protein, 15 aa, Homo sapiens
SPQILVPTLFNLLSR

SEQ ID NO: 8463 - protein, 17 aa, Homo sapiens
SQDLESVQEVGGSYWQR

SEQ ID NO: 8464 - protein, 7 aa, Homo sapiens
SSLPDYR

SEQ ID NO: 8465 - protein, 10 aa, Homo sapiens
TVLAAAYGEK

SEQ ID NO: 8466 - protein, 13 aa, Homo sapiens
VFAEYPGSSAQLR

SEQ ID NO: 8467 - protein, 15 aa, Homo sapiens
VNALLPTETFIPVIR

SEQ ID NO: 8468 - protein, 13 aa, Homo sapiens
VSLLNEQFLPLIR

SEQ ID NO: 8469 - protein, 14 aa, Homo sapiens
APEDFVDMVETYLK

SEQ ID NO: 8470 - protein, 12 aa, Homo sapiens
ALFSLAPEVEVR

SEQ ID NO: 8471 - protein, 11 aa, Homo sapiens
IFDPSPEDIAR

SEQ ID NO: 8472 - protein, 17 aa, Homo sapiens
ANSPEKPPEAGAAHKPR

SEQ ID NO: 8473 - protein, 17 aa, Homo sapiens
SLDLSGLELLSEHLDPK

SEQ ID NO: 8474 - protein, 19 aa, Homo sapiens
LEELSLEGNPFLTVNDNLK

SEQ ID NO: 8475 - protein, 14 aa, Homo sapiens
DASSTYSQVENLNR

SEQ ID NO: 8476 - protein, 13 aa, Homo sapiens
GSGLGTICLWSWR

SEQ ID NO: 8477 - protein, 11 aa, Homo sapiens
MISEELVAASR

SEQ ID NO: 8478 - protein, 9 aa, Homo sapiens
VSFLLPTLR

SEQ ID NO: 8479 - protein, 13 aa, Homo sapiens
YGPESLSEFTQWR

SEQ ID NO: 8480 - protein, 7 aa, Homo sapiens
TSGHVDK

SEQ ID NO: 8481 - protein, 13 aa, Homo sapiens
VPLVAEKPLKEPK

SEQ ID NO: 8482 - protein, 7 aa, Homo sapiens
VGISPDK

SEQ ID NO: 8483 - protein, 29 aa, Homo sapiens
KSEMESVLAQLDNYGQQELADLFVNYNVK

SEQ ID NO: 8484 - protein, 10 aa, Homo sapiens
VPLVAEKPLK

SEQ ID NO: 8485 - protein, 17 aa, Homo sapiens
CSVLPLSQNQEFMPFVK

SEQ ID NO: 8486 - protein, 11 aa, Homo sapiens
EDKAPQVDVDK

SEQ ID NO: 8487 - protein, 8 aa, Homo sapiens
AKMEDTLK

SEQ ID NO: 8488 - protein, 9 aa, Homo sapiens
RLLEFNQGK

SEQ ID NO: 8489 - protein, 20 aa, Homo sapiens
EFTMAEIEHFVDPSEKDHPK

SEQ ID NO: 8490 - protein, 10 aa, Homo sapiens
GEFTIETEGK

SEQ ID NO: 8491 - protein, 28 aa, Homo sapiens
SEMESVLAQLDNYGQQELADLFVNYNVK

SEQ ID NO: 8492 - protein, 12 aa, Homo sapiens
YPLFEGQETGKK

SEQ ID NO: 8493 - protein, 26 aa, Homo sapiens
TFIGPGGNMPGYLRPETAQGIFLNFK

SEQ ID NO: 8494 - protein, 9 aa, Homo sapiens
VGISPDKLR

SEQ ID NO: 8495 - protein, 8 aa, Homo sapiens
LLEFNQGK

SEQ ID NO: 8496 - protein, 11 aa, Homo sapiens
YPLFEGQETGK

SEQ ID NO: 8497 - protein, 8 aa, Homo sapiens
APQVDVDK

SEQ ID NO: 8498 - protein, 7 aa, Homo sapiens
ELALQPK

SEQ ID NO: 8499 - protein, 7 aa, Homo sapiens
FADFMVK

SEQ ID NO: 8500 - protein, 22 aa, Homo sapiens
VREFTMAEIEHFVDPSEKDHPK

SEQ ID NO: 8501 - protein, 15 aa, Homo sapiens
FQNVADLHLYLYSAK

SEQ ID NO: 8502 - protein, 11 aa, Homo sapiens
TVNVVQFEPSK

SEQ ID NO: 8503 - protein, 16 aa, Homo sapiens
EFTMAEIEHFVDPSEK

SEQ ID NO: 8504 - protein, 7 aa, Homo sapiens
IYLYLTK

SEQ ID NO: 8505 - protein, 7 aa, Homo sapiens
VPLVAEK

SEQ ID NO: 8506 - protein, 20 aa, Homo sapiens
QHMENEMAHYACDCWDAESK

SEQ ID NO: 8507 - protein, 19 aa, Homo sapiens
SPITGNDLSPPVSFNLMFK

SEQ ID NO: 8508 - protein, 13 aa, Homo sapiens
TFFSFPAVVAPFK

SEQ ID NO: 8509 - protein, 13 aa, Homo sapiens
LKEDKAPQVDVDK

SEQ ID NO: 8510 - protein, 26 aa, Homo sapiens
AEISELPSIVQDLANGNITWADVEAR

SEQ ID NO: 8511 - protein, 8 aa, Homo sapiens
ELSEALTR

SEQ ID NO: 8512 - protein, 13 aa, Homo sapiens
IMYTVFEHTFHVR

SEQ ID NO: 8513 - protein, 21 aa, Homo sapiens
LGDAVEQGVINNTVLGYFIGR

SEQ ID NO: 8514 - protein, 13 aa, Homo sapiens
LPFAAAQIGNSFR

SEQ ID NO: 8515 - protein, 8 aa, Homo sapiens
NNIIQTWR

SEQ ID NO: 8516 - protein, 10 aa, Homo sapiens
SCYDLSCHAR

SEQ ID NO: 8517 - protein, 20 aa, Homo sapiens
TLYVEEVVPNVIEPSFGLGR

SEQ ID NO: 8518 - protein, 14 aa, Homo sapiens
TSYGWIEIVGCADR

SEQ ID NO: 8519 - protein, 10 aa, Homo sapiens
VDDSSGSIGR

SEQ ID NO: 8520 - protein, 8 aa, Homo sapiens
AYLESFYK

SEQ ID NO: 8521 - protein, 10 aa, Homo sapiens
NVADYYPEYK

SEQ ID NO: 8522 - protein, 22 aa, Homo sapiens
AGVLSQADYLNLVQCETLEDLK

SEQ ID NO: 8523 - protein, 13 aa, Homo sapiens
LLFEGAGSNPGDK

SEQ ID NO: 8524 - protein, 7 aa, Homo sapiens
FFEHEVK

SEQ ID NO: 8525 - protein, 24 aa, Homo sapiens
FCTLLGGTTADAMCPILEFEADRR

SEQ ID NO: 8526 - protein, 27 aa, Homo sapiens
LHLQSTDYGNFLANEASPLTVSVIDDR

SEQ ID NO: 8527 - protein, 11 aa, Homo sapiens
LYPEGLAQLAR

SEQ ID NO: 8528 - protein, 13 aa, Homo sapiens
KDDYEYCMSEYLR

SEQ ID NO: 8529 - protein, 11 aa, Homo sapiens
MNREEILAFIK

SEQ ID NO: 8530 - protein, 16 aa, Homo sapiens
EDGSFAGDIWGEIDTR

SEQ ID NO: 8531 - protein, 17 aa, Homo sapiens
NEGITALYSGLKPTMIR

SEQ ID NO: 8532 - protein, 16 aa, Homo sapiens
DGPLGFYHGLSSTLLR

SEQ ID NO: 8533 - protein, 10 aa, Homo sapiens
FVALENISCK

SEQ ID NO: 8534 - protein, 18 aa, Homo sapiens
VFGAPNVVEDEIDQYLSK

SEQ ID NO: 8535 - protein, 11 aa, Homo sapiens
TRNEELAQTWK

SEQ ID NO: 8536 - protein, 14 aa, Homo sapiens
ESSSEQYVPDVFYK

SEQ ID NO: 8537 - protein, 14 aa, Homo sapiens
DVDKFGNEITQLAR

SEQ ID NO: 8538 - protein, 18 aa, Homo sapiens
DPVYTFSISQNPFPIENR

SEQ ID NO: 8539 - protein, 10 aa, Homo sapiens
FGNEITQLAR

SEQ ID NO: 8540 - protein, 30 aa, Homo sapiens
FVTAVATGGPDNQVHFEGYQVSNQCMALVR

SEQ ID NO: 8541 - protein, 15 aa, Homo sapiens
HVDNIMFENHTVADR

SEQ ID NO: 8542 - protein, 12 aa, Homo sapiens
TGNQHFGYLYGR

SEQ ID NO: 8543 - protein, 14 aa, Homo sapiens
VGWIFTDLVSEDTR

SEQ ID NO: 8544 - protein, 23 aa, Homo sapiens
VHPVIWSLTSLPFDCTQALAVPK

SEQ ID NO: 8545 - protein, 10 aa, Homo sapiens
NFILAADVMK

SEQ ID NO: 8546 - protein, 13 aa, Homo sapiens
IELQEWEHVTCMK

SEQ ID NO: 8547 - protein, 14 aa, Homo sapiens
LSVVEYDPGTHDLK

SEQ ID NO: 8548 - protein, 23 aa, Homo sapiens
AAASVLTTSMVTMEPGYLFLGSR

SEQ ID NO: 8549 - protein, 11 aa, Homo sapiens
DGFVQNVHTPR

SEQ ID NO: 8550 - protein, 11 aa, Homo sapiens
DLSGMFTTESR

SEQ ID NO: 8551 - protein, 14 aa, Homo sapiens
ENGTMEIYQLPDWR

SEQ ID NO: 8552 - protein, 16 aa, Homo sapiens
ESLAEEHEGLVGEGQR

SEQ ID NO: 8553 - protein, 15 aa, Homo sapiens
GFLYFNRHGFLILSR

SEQ ID NO: 8554 - protein, 17 aa, Homo sapiens
ISVLPAYLSYDAPWPVR

SEQ ID NO: 8555 - protein, 7 aa, Homo sapiens
LVVLPFR

SEQ ID NO: 8556 - protein, 10 aa, Homo sapiens
NVLDGELLNR

SEQ ID NO: 8557 - protein, 12 aa, Homo sapiens
SSFLPSYIIDVR

SEQ ID NO: 8558 - protein, 13 aa, Homo sapiens
TLSLHYFEEPELR

SEQ ID NO: 8559 - protein, 8 aa, Homo sapiens
VPHNINFR

SEQ ID NO: 8560 - protein, 14 aa, Homo sapiens
VYAVATSTNTPCAR

SEQ ID NO: 8561 - protein, 11 aa, Homo sapiens
YIVQVSPLGIR

SEQ ID NO: 8562 - protein, 9 aa, Homo sapiens
YLYLSTMER

SEQ ID NO: 8563 - protein, 10 aa, Homo sapiens
DAVIEFLLDK

SEQ ID NO: 8564 - protein, 15 aa, Homo sapiens
LSDNPAWEGDKGNTK

SEQ ID NO: 8565 - protein, 10 aa, Homo sapiens
SLFTTHSSAK

SEQ ID NO: 8566 - protein, 19 aa, Homo sapiens
AAESVSKPDVSEEAPGPSK

SEQ ID NO: 8567 - protein, 10 aa, Homo sapiens
RPIVACELGR

SEQ ID NO: 8568 - protein, 12 aa, Homo sapiens
SIADSEESEAYK

SEQ ID NO: 8569 - protein, 10 aa, Homo sapiens
VLATETVSHK

SEQ ID NO: 8570 - protein, 12 aa, Homo sapiens
VDGTCCYVTTYK

SEQ ID NO: 8571 - protein, 8 aa, Homo sapiens
DQPYLWAR

SEQ ID NO: 8572 - protein, 11 aa, Homo sapiens
ISDEGIAYLVK

SEQ ID NO: 8573 - protein, 10 aa, Homo sapiens
SDGKPCPPFK

SEQ ID NO: 8574 - protein, 28 aa, Homo sapiens
DLIDEGHAATQLVNQLHDVVVENNLSDK

SEQ ID NO: 8575 - protein, 13 aa, Homo sapiens
VITDIAGVIPAEK

SEQ ID NO: 8576 - protein, 12 aa, Homo sapiens
GTSISTKPPLTK

SEQ ID NO: 8577 - protein, 20 aa, Homo sapiens
SLEGADLPNLLFYGPPGTGK

SEQ ID NO: 8578 - protein, 21 aa, Homo sapiens
KSLEGADLPNLLFYGPPGTGK

SEQ ID NO: 8579 - protein, 10 aa, Homo sapiens
AITFLQSATR

SEQ ID NO: 8580 - protein, 9 aa, Homo sapiens
ELFGPELFR

SEQ ID NO: 8581 - protein, 10 aa, Homo sapiens
FCLICNYVSR

SEQ ID NO: 8582 - protein, 8 aa, Homo sapiens
IIEPLTSR

SEQ ID NO: 8583 - protein, 19 aa, Homo sapiens
IVILDEADSMTSAAQAALR

SEQ ID NO: 8584 - protein, 11 aa, Homo sapiens
NFAQLTVSGSR

SEQ ID NO: 8585 - protein, 10 aa, Homo sapiens
VLELNASDER

SEQ ID NO: 8586 - protein, 14 aa, Homo sapiens
DTTVQTLTLQPSVK

SEQ ID NO: 8587 - protein, 7 aa, Homo sapiens
EYIQLHR

SEQ ID NO: 8588 - protein, 14 aa, Homo sapiens
GPALINIQEYPIER

SEQ ID NO: 8589 - protein, 11 aa, Homo sapiens
HQATGELDDAK

SEQ ID NO: 8590 - protein, 18 aa, Homo sapiens
ISSDQLSSEHLSSAVEQK

SEQ ID NO: 8591 - protein, 13 aa, Homo sapiens
NVLPVLNNLLENR

SEQ ID NO: 8592 - protein, 10 aa, Homo sapiens
VIALGLPVPR

SEQ ID NO: 8593 - protein, 18 aa, Homo sapiens
DFDFESANAQFNKEEIDR

SEQ ID NO: 8594 - protein, 19 aa, Homo sapiens
YEGILYTIDTENSTVALAK

SEQ ID NO: 8595 - protein, 8 aa, Homo sapiens
EFADFEYR

SEQ ID NO: 8596 - protein, 8 aa, Homo sapiens
RPTWAEER

SEQ ID NO: 8597 - protein, 22 aa, Homo sapiens
AVPTGDMEDLPCGLVLSSIGYK

SEQ ID NO: 8598 - protein, 11 aa, Homo sapiens
FGVAPDHPEVK

SEQ ID NO: 8599 - protein, 13 aa, Homo sapiens
SRPVDPSVPFDSK

SEQ ID NO: 8600 - protein, 13 aa, Homo sapiens
TATEKPGPAEAAR

SEQ ID NO: 8601 - protein, 14 aa, Homo sapiens
PILDPVDFLGLQDK

SEQ ID NO: 8602 - protein, 22 aa, Homo sapiens
AGLLPSGPRPGYAAIQALLSSR

SEQ ID NO: 8603 - protein, 16 aa, Homo sapiens
ALEIPGEELPGVCSAR

SEQ ID NO: 8604 - protein, 16 aa, Homo sapiens
EAYHAVVLSYGAEDHR

SEQ ID NO: 8605 - protein, 10 aa, Homo sapiens
LGVIPNVEGR

SEQ ID NO: 8606 - protein, 13 aa, Homo sapiens
PGYAAIQALLSSR

SEQ ID NO: 8607 - protein, 11 aa, Homo sapiens
IALEGANVIYK

SEQ ID NO: 8608 - protein, 17 aa, Homo sapiens
AVATAVEQIYPFVFESR

SEQ ID NO: 8609 - protein, 15 aa, Homo sapiens
VVNVLAVCNMPFEIR

SEQ ID NO: 8610 - protein, 15 aa, Homo sapiens
VPDPQMSMENLVESK

SEQ ID NO: 8611 - protein, 11 aa, Homo sapiens
SALMPAQLFFK

SEQ ID NO: 8612 - protein, 8 aa, Homo sapiens
NKEFLQEK

SEQ ID NO: 8613 - protein, 11 aa, Homo sapiens
EVLEGLEYLHK

SEQ ID NO: 8614 - protein, 15 aa, Homo sapiens
LASGVEGSDIPDDGK

SEQ ID NO: 8615 - protein, 12 aa, Homo sapiens
LLSGGSVLDIIK

SEQ ID NO: 8616 - protein, 7 aa, Homo sapiens
FEFTPGR

SEQ ID NO: 8617 - protein, 8 aa, Homo sapiens
IPISLVLR

SEQ ID NO: 8618 - protein, 9 aa, Homo sapiens
RPTAAELLR

SEQ ID NO: 8619 - protein, 14 aa, Homo sapiens
SGVLDESTIATILR

SEQ ID NO: 8620 - protein, 15 aa, Homo sapiens
TAQALSSGSGSQETK

SEQ ID NO: 8621 - protein, 18 aa, Homo sapiens
TFVGTPCWMAPEVMEQVR

SEQ ID NO: 8622 - protein, 10 aa, Homo sapiens
LVEVIEEVNK

SEQ ID NO: 8623 - protein, 20 aa, Homo sapiens
VTAEADSSSPTGILATSESK

SEQ ID NO: 8624 - protein, 9 aa, Homo sapiens
LTQQLEEER

SEQ ID NO: 8625 - protein, 9 aa, Homo sapiens
QAVEEMMDR

SEQ ID NO: 8626 - protein, 13 aa, Homo sapiens
SLDPENSETELER

SEQ ID NO: 8627 - protein, 21 aa, Homo sapiens
TLEAEFNSPSPPTPEPGEGPR

SEQ ID NO: 8628 - protein, 20 aa, Homo sapiens
SCPETLTHAVGMSESPIGPK

SEQ ID NO: 8629 - protein, 13 aa, Homo sapiens
HGDNYLVLNLSEK

SEQ ID NO: 8630 - protein, 17 aa, Homo sapiens
EDLDNASKDDRFPDYGK

SEQ ID NO: 8631 - protein, 10 aa, Homo sapiens
DKEPGSFIVR

SEQ ID NO: 8632 - protein, 9 aa, Homo sapiens
HFLIECTPK

SEQ ID NO: 8633 - protein, 26 aa, Homo sapiens
QGAACNVWYLNSVEMESLTGHQAIQK

SEQ ID NO: 8634 - protein, 13 aa, Homo sapiens
VATPPPSVLQLNK

SEQ ID NO: 8635 - protein, 11 aa, Homo sapiens
VELVFSATPEK

SEQ ID NO: 8636 - protein, 14 aa, Homo sapiens
YVQFLSGLLSGSVK

SEQ ID NO: 8637 - protein, 19 aa, Homo sapiens
HPPFSPPEPPLSSPASQHK

SEQ ID NO: 8638 - protein, 34 aa, Homo sapiens
SLGSVSPSSSGFSSPHSGSTISIPFPNVLPDFSK

SEQ ID NO: 8639 - protein, 29 aa, Homo sapiens
LLIPERDPLEEIAESSPQTAANSAAELLK

SEQ ID NO: 8640 - protein, 18 aa, Homo sapiens
GVGSGPHPPDTQQPSPSK

SEQ ID NO: 8641 - protein, 28 aa, Homo sapiens
GCSNEPYFGSLTALVCQHSITPLALPCK

SEQ ID NO: 8642 - protein, 19 aa, Homo sapiens
AGVDYAPNLPPFPSPADVK

SEQ ID NO: 8643 - protein, 15 aa, Homo sapiens
ASEAASPLPDSPGDK

SEQ ID NO: 8644 - protein, 19 aa, Homo sapiens
ESMCSTPAFPVSPETPYVK

SEQ ID NO: 8645 - protein, 10 aa, Homo sapiens
VSALMQPSQK

SEQ ID NO: 8646 - protein, 20 aa, Homo sapiens
AELDQLLSGFGLEDPGSSLK

SEQ ID NO: 8647 - protein, 18 aa, Homo sapiens
LSLGQYDNDAGGQLPFSK

SEQ ID NO: 8648 - protein, 16 aa, Homo sapiens
IMDVGWPELHAPPLDK

SEQ ID NO: 8649 - protein, 19 aa, Homo sapiens
AQESWLNSNLQHVVVIHCR

SEQ ID NO: 8650 - protein, 14 aa, Homo sapiens
CPADNPGLVQAQPR

SEQ ID NO: 8651 - protein, 17 aa, Homo sapiens
ETMTPGYPQDLDIIDGR

SEQ ID NO: 8652 - protein, 10 aa, Homo sapiens
LPDTGEGPSR

SEQ ID NO: 8653 - protein, 23 aa, Homo sapiens
LYQAMQPVYTSGIYNVGPENPSR

SEQ ID NO: 8654 - protein, 15 aa, Homo sapiens
MEEGHGLDLTYITER

SEQ ID NO: 8655 - protein, 10 aa, Homo sapiens
PMVSLLGSGR

SEQ ID NO: 8656 - protein, 24 aa, Homo sapiens
PMVSLLGSGRPTGSPLSAEFSGTR

SEQ ID NO: 8657 - protein, 14 aa, Homo sapiens
PTGSPLSAEFSGTR

SEQ ID NO: 8658 - protein, 12 aa, Homo sapiens
QGSSAEQPLGGR

SEQ ID NO: 8659 - protein, 19 aa, Homo sapiens
QQQMVVAHQYSFAPDGEAR

SEQ ID NO: 8660 - protein, 7 aa, Homo sapiens
VFGFVAR

SEQ ID NO: 8661 - protein, 13 aa, Homo sapiens
VSAQGITLTDNQR

SEQ ID NO: 8662 - protein, 26 aa, Homo sapiens
FKEPPAYGPMCDILWSDPLEDFGNEK

SEQ ID NO: 8663 - protein, 8 aa, Homo sapiens
ITSFEEAK

SEQ ID NO: 8664 - protein, 9 aa, Homo sapiens
HLTEYFTFK

SEQ ID NO: 8665 - protein, 17 aa, Homo sapiens
GLTPTGMLPSGVLSGGK

SEQ ID NO: 8666 - protein, 10 aa, Homo sapiens
IITEGASILR

SEQ ID NO: 8667 - protein, 8 aa, Homo sapiens
LEESVALR

SEQ ID NO: 8668 - protein, 12 aa, Homo sapiens
LFEVGGSPANTR

SEQ ID NO: 8669 - protein, 11 aa, Homo sapiens
TQEHFTHNTVR

SEQ ID NO: 8670 - protein, 9 aa, Homo sapiens
YENNVMNIR

SEQ ID NO: 8671 - protein, 10 aa, Homo sapiens
YLFLGDYVDR

SEQ ID NO: 8672 - protein, 17 aa, Homo sapiens
MEIATKDPLNPIKQDVK

SEQ ID NO: 8673 - protein, 19 aa, Homo sapiens
YKVPDGKPENEFAFNAEFK

SEQ ID NO: 8674 - protein, 8 aa, Homo sapiens
DFAIDIIK

SEQ ID NO: 8675 - protein, 28 aa, Homo sapiens
AIVDALPPPCESACTVPTDVDKWFHHQK

SEQ ID NO: 8676 - protein, 17 aa, Homo sapiens
VPDGKPENEFAFNAEFK

SEQ ID NO: 8677 - protein, 19 aa, Homo sapiens
HTGCCGDNDPIDVCEIGSK

SEQ ID NO: 8678 - protein, 16 aa, Homo sapiens
VLGILAMIDEGETDWK

SEQ ID NO: 8679 - protein, 10 aa, Homo sapiens
DKDFAIDIIK

SEQ ID NO: 8680 - protein, 15 aa, Homo sapiens
GISCMNTTLSESPFK

SEQ ID NO: 8681 - protein, 13 aa, Homo sapiens
MEIATKDPLNPIK

SEQ ID NO: 8682 - protein, 21 aa, Homo sapiens
GYIWNYGAIPQTWEDPGHNDK

SEQ ID NO: 8683 - protein, 11 aa, Homo sapiens
DPLNPIKQDVK

SEQ ID NO: 8684 - protein, 22 aa, Homo sapiens
VIAINVDDPDAANYNDINDVKR

SEQ ID NO: 8685 - protein, 7 aa, Homo sapiens
DPLNPIK

SEQ ID NO: 8686 - protein, 9 aa, Homo sapiens
YVANLFPYK

SEQ ID NO: 8687 - protein, 21 aa, Homo sapiens
VIAINVDDPDAANYNDINDVK

SEQ ID NO: 8688 - protein, 14 aa, Homo sapiens
LKPGYLEATVDWFR

SEQ ID NO: 8689 - protein, 16 aa, Homo sapiens
GQYISPFHDIPIYADK

SEQ ID NO: 8690 - protein, 7 aa, Homo sapiens
GEIIGVK

SEQ ID NO: 8691 - protein, 9 aa, Homo sapiens
AAPFSLEYR

SEQ ID NO: 8692 - protein, 8 aa, Homo sapiens
SGFSTEER

SEQ ID NO: 8693 - protein, 11 aa, Homo sapiens
IITAESGKPLK

SEQ ID NO: 8694 - protein, 8 aa, Homo sapiens
GIHDAFVK

SEQ ID NO: 8695 - protein, 14 aa, Homo sapiens
EVGEAICTDPLVSK

SEQ ID NO: 8696 - protein, 11 aa, Homo sapiens
ISFTGSTTTGK

SEQ ID NO: 8697 - protein, 12 aa, Homo sapiens
RVYGDIIHTPAK

SEQ ID NO: 8698 - protein, 8 aa, Homo sapiens
AAYEAFCR

SEQ ID NO: 8699 - protein, 10 aa, Homo sapiens
LAGLSAALLR

SEQ ID NO: 8700 - protein, 8 aa, Homo sapiens
TDSFVGGR

SEQ ID NO: 8701 - protein, 28 aa, Homo sapiens
WLPAAATFPVQDPASGAALGMVADCGVR

SEQ ID NO: 8702 - protein, 21 aa, Homo sapiens
EFHQAGKPIGLCCIAPVLAAK

SEQ ID NO: 8703 - protein, 10 aa, Homo sapiens
NLSTFAVDGK

SEQ ID NO: 8704 - protein, 22 aa, Homo sapiens
GGAEVQIFAPDVPQMHVIDHTK

SEQ ID NO: 8705 - protein, 11 aa, Homo sapiens
WPYAGTAEAIK

SEQ ID NO: 8706 - protein, 26 aa, Homo sapiens
GVEVTVGHEQEEGGKWPYAGTAEAIK

SEQ ID NO: 8707 - protein, 14 aa, Homo sapiens
PIGLCCIAPVLAAK

SEQ ID NO: 8708 - protein, 8 aa, Homo sapiens
KVLELTGK

SEQ ID NO: 8709 - protein, 15 aa, Homo sapiens
GVEVTVGHEQEEGGK

SEQ ID NO: 8710 - protein, 25 aa, Homo sapiens
ITDLANLSAANHDAAIFPGGFGAAK

SEQ ID NO: 8711 - protein, 10 aa, Homo sapiens
EVVEAHVDQK

SEQ ID NO: 8712 - protein, 7 aa, Homo sapiens
VLELTGK

SEQ ID NO: 8713 - protein, 8 aa, Homo sapiens
NVLTESAR

SEQ ID NO: 8714 - protein, 25 aa, Homo sapiens
VVTTPAFMCETALHYIHDGIGAMVR

SEQ ID NO: 8715 - protein, 17 aa, Homo sapiens
PVILDPVDPTNNVSGDK

SEQ ID NO: 8716 - protein, 19 aa, Homo sapiens
EFEFSQLPLKVEFLECSAK

SEQ ID NO: 8717 - protein, 12 aa, Homo sapiens
AVLLVGLCDSGK

SEQ ID NO: 8718 - protein, 8 aa, Homo sapiens
LIQQQLEK

SEQ ID NO: 8719 - protein, 10 aa, Homo sapiens
EFEFSQLPLK

SEQ ID NO: 8720 - protein, 12 aa, Homo sapiens
GKEFEFSQLPLK

SEQ ID NO: 8721 - protein, 21 aa, Homo sapiens
GKEFEFSQLPLKVEFLECSAK

SEQ ID NO: 8722 - protein, 11 aa, Homo sapiens
NTPSFLIACNK

SEQ ID NO: 8723 - protein, 19 aa, Homo sapiens
SAAPSTLDSSSTAPAQLGK

SEQ ID NO: 8724 - protein, 13 aa, Homo sapiens
AIVFVVDSAAFQR

SEQ ID NO: 8725 - protein, 14 aa, Homo sapiens
DTQTSITDSCAVYR

SEQ ID NO: 8726 - protein, 16 aa, Homo sapiens
GNSLTLIDLPGHESLR

SEQ ID NO: 8727 - protein, 19 aa, Homo sapiens
VADGGGAGGTFQPYLDTLR

SEQ ID NO: 8728 - protein, 7 aa, Homo sapiens
IVLFLQK

SEQ ID NO: 8729 - protein, 8 aa, Homo sapiens
LSITEVTK

SEQ ID NO: 8730 - protein, 19 aa, Homo sapiens
HIDYFNNQIIVDLVEQQHK

SEQ ID NO: 8731 - protein, 11 aa, Homo sapiens
CGFQDDVAYGK

SEQ ID NO: 8732 - protein, 13 aa, Homo sapiens
IGELVGVLVNHFK

SEQ ID NO: 8733 - protein, 15 aa, Homo sapiens
GDPIGGHINNYLLEK

SEQ ID NO: 8734 - protein, 9 aa, Homo sapiens
NYDTTIHGK

SEQ ID NO: 8735 - protein, 14 aa, Homo sapiens
VIGFKPEEIQTVYK

SEQ ID NO: 8736 - protein, 17 aa, Homo sapiens
HLQVNVTNPVQCSLHGK

SEQ ID NO: 8737 - protein, 13 aa, Homo sapiens
VTDEMFLEALNSK

SEQ ID NO: 8738 - protein, 12 aa, Homo sapiens
SNCVLEAFGNAK

SEQ ID NO: 8739 - protein, 28 aa, Homo sapiens
AWEGNYLASKPDTPQTSGTFVPVANELK

SEQ ID NO: 8740 - protein, 12 aa, Homo sapiens
VVSIIAELLSTK

SEQ ID NO: 8741 - protein, 10 aa, Homo sapiens
LNQPQPDFTK

SEQ ID NO: 8742 - protein, 11 aa, Homo sapiens
LMYNSSNPVLK

SEQ ID NO: 8743 - protein, 13 aa, Homo sapiens
NSMIALVDNLASK

SEQ ID NO: 8744 - protein, 29 aa, Homo sapiens
AWEGNYLASKPDTPQTSGTFVPVANELKR

SEQ ID NO: 8745 - protein, 13 aa, Homo sapiens
HQVEYLGLLENVR

SEQ ID NO: 8746 - protein, 8 aa, Homo sapiens
LFCWIVTR

SEQ ID NO: 8747 - protein, 7 aa, Homo sapiens
LLNIYGR

SEQ ID NO: 8748 - protein, 11 aa, Homo sapiens
QHTEQEASYGR

SEQ ID NO: 8749 - protein, 12 aa, Homo sapiens
RFEEALQTIFNR

SEQ ID NO: 8750 - protein, 18 aa, Homo sapiens
SFHSFYQLLQGGSEQMLR

SEQ ID NO: 8751 - protein, 11 aa, Homo sapiens
SIPASDLPQVR

SEQ ID NO: 8752 - protein, 9 aa, Homo sapiens
SPQIFDDER

SEQ ID NO: 8753 - protein, 10 aa, Homo sapiens
SSINDAAEFR

SEQ ID NO: 8754 - protein, 8 aa, Homo sapiens
SYIHEVAR

SEQ ID NO: 8755 - protein, 9 aa, Homo sapiens
TLFTLEELR

SEQ ID NO: 8756 - protein, 9 aa, Homo sapiens
VIVQQPGER

SEQ ID NO: 8757 - protein, 15 aa, Homo sapiens
YIMQYIAAITNPSQR

SEQ ID NO: 8758 - protein, 22 aa, Homo sapiens
IKSGEEDFESLASQFSDCSSAK

SEQ ID NO: 8759 - protein, 15 aa, Homo sapiens
TKEEALELINGYIQK

SEQ ID NO: 8760 - protein, 20 aa, Homo sapiens
SGEEDFESLASQFSDCSSAK

SEQ ID NO: 8761 - protein, 15 aa, Homo sapiens
GQMQKPFEDASFALR

SEQ ID NO: 8762 - protein, 7 aa, Homo sapiens
CSHLLVK

SEQ ID NO: 8763 - protein, 12 aa, Homo sapiens
ADEEKLPPGWEK

SEQ ID NO: 8764 - protein, 8 aa, Homo sapiens
GDLGAFSR

SEQ ID NO: 8765 - protein, 19 aa, Homo sapiens
TGEMSGPVFTDSGIHIILR

SEQ ID NO: 8766 - protein, 15 aa, Homo sapiens
VYYFNHITNASQWER

SEQ ID NO: 8767 - protein, 11 aa, Homo sapiens
EKKPASPQVVK

SEQ ID NO: 8768 - protein, 14 aa, Homo sapiens
SVSTSPSILTAFLK

SEQ ID NO: 8769 - protein, 17 aa, Homo sapiens
LNVTAAAAQVGLTPGDK

SEQ ID NO: 8770 - protein, 14 aa, Homo sapiens
EASTMTNQAESEIK

SEQ ID NO: 8771 - protein, 11 aa, Homo sapiens
APEHFEQEQLR

SEQ ID NO: 8772 - protein, 13 aa, Homo sapiens
QHSVFQSMLQNFR

SEQ ID NO: 8773 - protein, 19 aa, Homo sapiens
SQESGGTESAANPTPSPIR

SEQ ID NO: 8774 - protein, 7 aa, Homo sapiens
VPLPAQR

SEQ ID NO: 8775 - protein, 14 aa, Homo sapiens
FDEKENVSNCIQLK

SEQ ID NO: 8776 - protein, 8 aa, Homo sapiens
MSAEDIEK

SEQ ID NO: 8777 - protein, 15 aa, Homo sapiens
KFDEKENVSNCIQLK

SEQ ID NO: 8778 - protein, 17 aa, Homo sapiens
LYPAAVDTIVAIMAEGK

SEQ ID NO: 8779 - protein, 12 aa, Homo sapiens
YPFILPHQQVDK

SEQ ID NO: 8780 - protein, 10 aa, Homo sapiens
ENVSNCIQLK

SEQ ID NO: 8781 - protein, 19 aa, Homo sapiens
FVLSGANIMCPGLTSPGAK

SEQ ID NO: 8782 - protein, 18 aa, Homo sapiens
GIGIENIHYLNDGLWHMK

SEQ ID NO: 8783 - protein, 9 aa, Homo sapiens
EGPFYPTLR

SEQ ID NO: 8784 - protein, 20 aa, Homo sapiens
NQLIEQFPGIEPWLNQIMPK

SEQ ID NO: 8785 - protein, 12 aa, Homo sapiens
LGQLNIDISNIK

SEQ ID NO: 8786 - protein, 12 aa, Homo sapiens
EILHSVYECIEK

SEQ ID NO: 8787 - protein, 18 aa, Homo sapiens
AVLGPLVGAVDQGTSSTR

SEQ ID NO: 8788 - protein, 13 aa, Homo sapiens
FEPQINAEESEIR

SEQ ID NO: 8789 - protein, 15 aa, Homo sapiens
HSNLVQLLGVIVEEK

SEQ ID NO: 8790 - protein, 11 aa, Homo sapiens
GDVLTIVAVTK

SEQ ID NO: 8791 - protein, 9 aa, Homo sapiens
IPLKDVVPR

SEQ ID NO: 8792 - protein, 18 aa, Homo sapiens
ESTNYPGDYTLCVSCDGK

SEQ ID NO: 8793 - protein, 7 aa, Homo sapiens
LLQTIGK

SEQ ID NO: 8794 - protein, 11 aa, Homo sapiens
NVLVSEDNVAK

SEQ ID NO: 8795 - protein, 7 aa, Homo sapiens
EQLEHIK

SEQ ID NO: 8796 - protein, 16 aa, Homo sapiens
SAIQAAWPSGTECIAK

SEQ ID NO: 8797 - protein, 8 aa, Homo sapiens
SGWALNMK

SEQ ID NO: 8798 - protein, 10 aa, Homo sapiens
LSLMPWFHGK

SEQ ID NO: 8799 - protein, 11 aa, Homo sapiens
EGIIPANYVQK

SEQ ID NO: 8800 - protein, 15 aa, Homo sapiens
YNFHGTAEQDLPFCK

SEQ ID NO: 8801 - protein, 12 aa, Homo sapiens
GGLYIVTEYMAK

SEQ ID NO: 8802 - protein, 20 aa, Homo sapiens
FSLDVCEAMEYLEGNNFVHR

SEQ ID NO: 8803 - protein, 12 aa, Homo sapiens
GEFGDVMLGDYR

SEQ ID NO: 8804 - protein, 8 aa, Homo sapiens
GSLVDYLR

SEQ ID NO: 8805 - protein, 13 aa, Homo sapiens
LLYPPETGLFLVR

SEQ ID NO: 8806 - protein, 10 aa, Homo sapiens
NCWHLDAAMR

SEQ ID NO: 8807 - protein, 19 aa, Homo sapiens
NDATAQAFLAEASVMTQLR

SEQ ID NO: 8808 - protein, 7 aa, Homo sapiens
PSFLQLR

SEQ ID NO: 8809 - protein, 14 aa, Homo sapiens
VMEGTVAAQDEFYR

SEQ ID NO: 8810 - protein, 8 aa, Homo sapiens
WTAPEALR

SEQ ID NO: 8811 - protein, 13 aa, Homo sapiens
VTSAHKGPDETLR

SEQ ID NO: 8812 - protein, 8 aa, Homo sapiens
IATGSFLK

SEQ ID NO: 8813 - protein, 14 aa, Homo sapiens
DLKEVTPEGLQMVK

SEQ ID NO: 8814 - protein, 11 aa, Homo sapiens
ATAEVLNIGKK

SEQ ID NO: 8815 - protein, 20 aa, Homo sapiens
IKAEYEGDGIPTVFVAVAGR

SEQ ID NO: 8816 - protein, 18 aa, Homo sapiens
DDANNDPQWSEEQLIAAK

SEQ ID NO: 8817 - protein, 22 aa, Homo sapiens
KCGETAFIAPQCEMIPIEWVCR

SEQ ID NO: 8818 - protein, 10 aa, Homo sapiens
IEFGVDVTTK

SEQ ID NO: 8819 - protein, 16 aa, Homo sapiens
VVVLMGSTSDLGHCEK

SEQ ID NO: 8820 - protein, 11 aa, Homo sapiens
EVTPEGLQMVK

SEQ ID NO: 8821 - protein, 13 aa, Homo sapiens
SWLPQNCTLVDMK

SEQ ID NO: 8822 - protein, 13 aa, Homo sapiens
TKEVYELLDSPGK

SEQ ID NO: 8823 - protein, 13 aa, Homo sapiens
KACGNFGIPCELR

SEQ ID NO: 8824 - protein, 24 aa, Homo sapiens
VELFFKDDANNDPQWSEEQLIAAK

SEQ ID NO: 8825 - protein, 11 aa, Homo sapiens
EVYELLDSPGK

SEQ ID NO: 8826 - protein, 15 aa, Homo sapiens
ITSCIFQLLQEAGIK

SEQ ID NO: 8827 - protein, 10 aa, Homo sapiens
ATAEVLNIGK

SEQ ID NO: 8828 - protein, 9 aa, Homo sapiens
RIATGSFLK

SEQ ID NO: 8829 - protein, 9 aa, Homo sapiens
KNFEWVAER

SEQ ID NO: 8830 - protein, 12 aa, Homo sapiens
ACGNFGIPCELR

SEQ ID NO: 8831 - protein, 18 aa, Homo sapiens
AEYEGDGIPTVFVAVAGR

SEQ ID NO: 8832 - protein, 10 aa, Homo sapiens
DQITAGNAAR

SEQ ID NO: 8833 - protein, 14 aa, Homo sapiens
EIVLADVIDNDSWR

SEQ ID NO: 8834 - protein, 7 aa, Homo sapiens
GPDETLR

SEQ ID NO: 8835 - protein, 8 aa, Homo sapiens
NFEWVAER

SEQ ID NO: 8836 - protein, 8 aa, Homo sapiens
KIAELLCK

SEQ ID NO: 8837 - protein, 15 aa, Homo sapiens
DHNNPQEGPTSSSGR

SEQ ID NO: 8838 - protein, 26 aa, Homo sapiens
FLDPLPTSGITPGATVLTASGQTVGK

SEQ ID NO: 8839 - protein, 15 aa, Homo sapiens
AGQGNVGLALLWSEK

SEQ ID NO: 8840 - protein, 12 aa, Homo sapiens
AGYAHFLNVQGR

SEQ ID NO: 8841 - protein, 11 aa, Homo sapiens
GCYIGQELTAR

SEQ ID NO: 8842 - protein, 20 aa, Homo sapiens
VWAVLPSSPEACGAASLQER

SEQ ID NO: 8843 - protein, 10 aa, Homo sapiens
YLQGVPEGVR

SEQ ID NO: 8844 - protein, 18 aa, Homo sapiens
VAWVSHDSTVCLADADKK

SEQ ID NO: 8845 - protein, 23 aa, Homo sapiens
STVLSLDWHPNNVLLAAGSCDFK

SEQ ID NO: 8846 - protein, 8 aa, Homo sapiens
NAYVWTLK

SEQ ID NO: 8847 - protein, 14 aa, Homo sapiens
EVEERPAPTPWGSK

SEQ ID NO: 8848 - protein, 19 aa, Homo sapiens
CSQFCTTGMDGGMSIWDVK

SEQ ID NO: 8849 - protein, 17 aa, Homo sapiens
AYHSFLVEPISCHAWNK

SEQ ID NO: 8850 - protein, 17 aa, Homo sapiens
TQIAICPNNHEVHIYEK

SEQ ID NO: 8851 - protein, 17 aa, Homo sapiens
VAWVSHDSTVCLADADK

SEQ ID NO: 8852 - protein, 9 aa, Homo sapiens
PAPTPWGSK

SEQ ID NO: 8853 - protein, 10 aa, Homo sapiens
TWKPTLVILR

SEQ ID NO: 8854 - protein, 19 aa, Homo sapiens
KASSEGGTAAGAGLDSLHK

SEQ ID NO: 8855 - protein, 7 aa, Homo sapiens
SLESALK

SEQ ID NO: 8856 - protein, 18 aa, Homo sapiens
ASSEGGTAAGAGLDSLHK

SEQ ID NO: 8857 - protein, 13 aa, Homo sapiens
NSVSQISVLSGGK

SEQ ID NO: 8858 - protein, 7 aa, Homo sapiens
IFSAYIK

SEQ ID NO: 8859 - protein, 17 aa, Homo sapiens
EHNGQVTGIDWAPESNR

SEQ ID NO: 8860 - protein, 8 aa, Homo sapiens
FAVGSGSR

SEQ ID NO: 8861 - protein, 8 aa, Homo sapiens
IVTCGTDR

SEQ ID NO: 8862 - protein, 14 aa, Homo sapiens
GSCSTEVEKETQEK

SEQ ID NO: 8863 - protein, 15 aa, Homo sapiens
ASQSQGIQQLLQAEK

SEQ ID NO: 8864 - protein, 16 aa, Homo sapiens
ASQSQGIQQLLQAEKR

SEQ ID NO: 8865 - protein, 11 aa, Homo sapiens
EEAQAEIEQYR

SEQ ID NO: 8866 - protein, 9 aa, Homo sapiens
MTILQTYFR

SEQ ID NO: 8867 - protein, 24 aa, Homo sapiens
GPLLEDGALSQAVSAGASSPEFTK

SEQ ID NO: 8868 - protein, 22 aa, Homo sapiens
HQGGWTDGGSGGGGGYQDGGYR

SEQ ID NO: 8869 - protein, 15 aa, Homo sapiens
IEAINQAIANEYEVR

SEQ ID NO: 8870 - protein, 10 aa, Homo sapiens
LCAWLVSELR

SEQ ID NO: 8871 - protein, 12 aa, Homo sapiens
TTISVAHLLAAR

SEQ ID NO: 8872 - protein, 11 aa, Homo sapiens
GNNVLYISTQK

SEQ ID NO: 8873 - protein, 10 aa, Homo sapiens
QIIGRPVVVK

SEQ ID NO: 8874 - protein, 8 aa, Homo sapiens
QTPSDFLK

SEQ ID NO: 8875 - protein, 9 aa, Homo sapiens
KQTPSDFLK

SEQ ID NO: 8876 - protein, 8 aa, Homo sapiens
LNSGVDYR

SEQ ID NO: 8877 - protein, 7 aa, Homo sapiens
YGDAFIR

SEQ ID NO: 8878 - protein, 8 aa, Homo sapiens
GFLDACEK

SEQ ID NO: 8879 - protein, 12 aa, Homo sapiens
YLEATGQLPVKK

SEQ ID NO: 8880 - protein, 12 aa, Homo sapiens
NIGISAHIDSGK

SEQ ID NO: 8881 - protein, 8 aa, Homo sapiens
IPSISDLK

SEQ ID NO: 8882 - protein, 12 aa, Homo sapiens
DNSHPFVGLAFK

SEQ ID NO: 8883 - protein, 12 aa, Homo sapiens
SFTPVFLGSALK

SEQ ID NO: 8884 - protein, 22 aa, Homo sapiens
QELIECVANSDEQLGEMFLEEK

SEQ ID NO: 8885 - protein, 11 aa, Homo sapiens
YNVPFLTFINK

SEQ ID NO: 8886 - protein, 19 aa, Homo sapiens
LNHNAAFMQIPMGLEGNFK

SEQ ID NO: 8887 - protein, 29 aa, Homo sapiens
VIGVLEPLDPEDYTKLEFSDETFGSNIPK

SEQ ID NO: 8888 - protein, 14 aa, Homo sapiens
ETITAPVPFDFTHK

SEQ ID NO: 8889 - protein, 26 aa, Homo sapiens
ANSGLSMESIHVPDPVISIAMKPSNK

SEQ ID NO: 8890 - protein, 15 aa, Homo sapiens
VIGVLEPLDPEDYTK

SEQ ID NO: 8891 - protein, 15 aa, Homo sapiens
YQPCLPSTQEDVINK

SEQ ID NO: 8892 - protein, 14 aa, Homo sapiens
LEFSDETFGSNIPK

SEQ ID NO: 8893 - protein, 11 aa, Homo sapiens
YLEATGQLPVK

SEQ ID NO: 8894 - protein, 14 aa, Homo sapiens
GITIQSAATYTMWK

SEQ ID NO: 8895 - protein, 13 aa, Homo sapiens
AIYFDGDFGQIVR

SEQ ID NO: 8896 - protein, 8 aa, Homo sapiens
FGQLTYVR

SEQ ID NO: 8897 - protein, 20 aa, Homo sapiens
FVLQDGAHHMVDSNEISFIR

SEQ ID NO: 8898 - protein, 9 aa, Homo sapiens
GEYTMEYSR

SEQ ID NO: 8899 - protein, 7 aa, Homo sapiens
ILMNSSR

SEQ ID NO: 8900 - protein, 7 aa, Homo sapiens
VLYYTGR

SEQ ID NO: 8901 - protein, 9 aa, Homo sapiens
YGEIPAELR

SEQ ID NO: 8902 - protein, 11 aa, Homo sapiens
EKFEEMIQQIK

SEQ ID NO: 8903 - protein, 20 aa, Homo sapiens
ISDSVLVDIKDTEPLIQTAK

SEQ ID NO: 8904 - protein, 14 aa, Homo sapiens
IAILTCPFEPPKPK

SEQ ID NO: 8905 - protein, 12 aa, Homo sapiens
HKLDVTSVEDYK

SEQ ID NO: 8906 - protein, 16 aa, Homo sapiens
LGFAGLVQEISFGTTK

SEQ ID NO: 8907 - protein, 8 aa, Homo sapiens
MLVIEQCK

SEQ ID NO: 8908 - protein, 12 aa, Homo sapiens
KQQISLATQMVR

SEQ ID NO: 8909 - protein, 15 aa, Homo sapiens
GVIVDKDFSHPQMPK

SEQ ID NO: 8910 - protein, 7 aa, Homo sapiens
MIIEEAK

SEQ ID NO: 8911 - protein, 13 aa, Homo sapiens
EMNPALGIDCLHK

SEQ ID NO: 8912 - protein, 19 aa, Homo sapiens
ASMGTLAFDEYGRPFLIIK

SEQ ID NO: 8913 - protein, 7 aa, Homo sapiens
LMVELSK

SEQ ID NO: 8914 - protein, 30 aa, Homo sapiens
MMVDKDGDVTVTNDGATILSMMDVDHQIAK

SEQ ID NO: 8915 - protein, 8 aa, Homo sapiens
FSELTAEK

SEQ ID NO: 8916 - protein, 10 aa, Homo sapiens
LDVTSVEDYK

SEQ ID NO: 8917 - protein, 8 aa, Homo sapiens
DVDFELIK

SEQ ID NO: 8918 - protein, 8 aa, Homo sapiens
LMGLEALK

SEQ ID NO: 8919 - protein, 8 aa, Homo sapiens
VAIEHLDK

SEQ ID NO: 8920 - protein, 11 aa, Homo sapiens
QQHVIETLIGK

SEQ ID NO: 8921 - protein, 8 aa, Homo sapiens
MIIEEAKR

SEQ ID NO: 8922 - protein, 7 aa, Homo sapiens
AVTIFIR

SEQ ID NO: 8923 - protein, 10 aa, Homo sapiens
CPTLEQYAMR

SEQ ID NO: 8924 - protein, 30 aa, Homo sapiens
ETGANLAICQWGFDDEANHLLLQNNLPAVR

SEQ ID NO: 8925 - protein, 10 aa, Homo sapiens
IADGYEQAAR

SEQ ID NO: 8926 - protein, 11 aa, Homo sapiens
QQISLATQMVR

SEQ ID NO: 8927 - protein, 10 aa, Homo sapiens
SLHDALCVIR

SEQ ID NO: 8928 - protein, 30 aa, Homo sapiens
SQDDEIGDGTTGVVVLAGALLEEAEQLLDR

SEQ ID NO: 8929 - protein, 17 aa, Homo sapiens
WVGGPEIELIAIATGGR

SEQ ID NO: 8930 - protein, 17 aa, Homo sapiens
MNPIVVVHGGGAGPISK

SEQ ID NO: 8931 - protein, 11 aa, Homo sapiens
ELLFHHEWVVK

SEQ ID NO: 8932 - protein, 12 aa, Homo sapiens
DELLPHILPLLK

SEQ ID NO: 8933 - protein, 10 aa, Homo sapiens
YSDIDIILLK

SEQ ID NO: 8934 - protein, 13 aa, Homo sapiens
ATVGILITTIASK

SEQ ID NO: 8935 - protein, 14 aa, Homo sapiens
SNILTLMYQCMQDK

SEQ ID NO: 8936 - protein, 24 aa, Homo sapiens
ICEDSAEILDSDVLDRPLNIMIPK

SEQ ID NO: 8937 - protein, 7 aa, Homo sapiens
CVNLVQK

SEQ ID NO: 8938 - protein, 23 aa, Homo sapiens
YAHWVVSQPPDTYLKPLMTELLK

SEQ ID NO: 8939 - protein, 10 aa, Homo sapiens
FSDQFPLPLK

SEQ ID NO: 8940 - protein, 12 aa, Homo sapiens
GELQNWPDLLPK

SEQ ID NO: 8941 - protein, 12 aa, Homo sapiens
QSSFALLGDLTK

SEQ ID NO: 8942 - protein, 22 aa, Homo sapiens
LCSLLDSEDYNTCEGAFGALQK

SEQ ID NO: 8943 - protein, 11 aa, Homo sapiens
ESQSPDTTIQR

SEQ ID NO: 8944 - protein, 19 aa, Homo sapiens
GDVEEDETIPDSEQDIRPR

SEQ ID NO: 8945 - protein, 9 aa, Homo sapiens
LKSEDEPTR

SEQ ID NO: 8946 - protein, 15 aa, Homo sapiens
LLPHMHNIVEYMLQR

SEQ ID NO: 8947 - protein, 9 aa, Homo sapiens
NQVGDENWR

SEQ ID NO: 8948 - protein, 7 aa, Homo sapiens
PWCTSLR

SEQ ID NO: 8949 - protein, 15 aa, Homo sapiens
SECLNNIGDSSPLIR

SEQ ID NO: 8950 - protein, 12 aa, Homo sapiens
TLLENTAITIGR

SEQ ID NO: 8951 - protein, 12 aa, Homo sapiens
CNLGSPEDFLSK

SEQ ID NO: 8952 - protein, 10 aa, Homo sapiens
HKAPAAAVVR

SEQ ID NO: 8953 - protein, 13 aa, Homo sapiens
SAEAGIAGEAQSK

SEQ ID NO: 8954 - protein, 13 aa, Homo sapiens
SLEEEEKFDPNER

SEQ ID NO: 8955 - protein, 15 aa, Homo sapiens
YAEQQNEEEKNENSK

SEQ ID NO: 8956 - protein, 12 aa, Homo sapiens
VVVVAGETGSGK

SEQ ID NO: 8957 - protein, 18 aa, Homo sapiens
ALDPPQLQVISNAMNLLR

SEQ ID NO: 8958 - protein, 12 aa, Homo sapiens
PATAAAAAAGSR

SEQ ID NO: 8959 - protein, 7 aa, Homo sapiens
FSIEDLK

SEQ ID NO: 8960 - protein, 15 aa, Homo sapiens
NNPHYDPSSKEDNPK

SEQ ID NO: 8961 - protein, 11 aa, Homo sapiens
EAYPDHTQFEK

SEQ ID NO: 8962 - protein, 13 aa, Homo sapiens
LGEEAFFYHSNCK

SEQ ID NO: 8963 - protein, 8 aa, Homo sapiens
FIPLAELK

SEQ ID NO: 8964 - protein, 7 aa, Homo sapiens
NMVLFTR

SEQ ID NO: 8965 - protein, 9 aa, Homo sapiens
QTTCWDGVR

SEQ ID NO: 8966 - protein, 7 aa, Homo sapiens
SYHQAHK

SEQ ID NO: 8967 - protein, 10 aa, Homo sapiens
WSMVDVQFVR

SEQ ID NO: 8968 - protein, 10 aa, Homo sapiens
MVWEGLNVVK

SEQ ID NO: 8969 - protein, 9 aa, Homo sapiens
VWEGLNVVK

SEQ ID NO: 8970 - protein, 27 aa, Homo sapiens
RQPPARPPGPSTDTGALADGVVSQAVK

SEQ ID NO: 8971 - protein, 9 aa, Homo sapiens
TFNQVVKPR

SEQ ID NO: 8972 - protein, 12 aa, Homo sapiens
HLPDRQDGPAAK

SEQ ID NO: 8973 - protein, 16 aa, Homo sapiens
VLEGLREDMLETLVPK

SEQ ID NO: 8974 - protein, 24 aa, Homo sapiens
AETVPEEANYEAVPVEAYGLAMLR

SEQ ID NO: 8975 - protein, 20 aa, Homo sapiens
EGVLPLTAASTAPISFGFTR

SEQ ID NO: 8976 - protein, 21 aa, Homo sapiens
GLGLGANLTEAQALTPTGPSR

SEQ ID NO: 8977 - protein, 19 aa, Homo sapiens
LADSGDGAGPSPEEKDFLK

SEQ ID NO: 8978 - protein, 10 aa, Homo sapiens
VEGLDPDNVR

SEQ ID NO: 8979 - protein, 11 aa, Homo sapiens
VMVVLGPQTGR

SEQ ID NO: 8980 - protein, 18 aa, Homo sapiens
LLMHLEEMQHTISTDEEK

SEQ ID NO: 8981 - protein, 15 aa, Homo sapiens
KNWCALITETAGSLK

SEQ ID NO: 8982 - protein, 16 aa, Homo sapiens
TQEIQENLLSLEETMK

SEQ ID NO: 8983 - protein, 13 aa, Homo sapiens
ELVPPDTLHSLPK

SEQ ID NO: 8984 - protein, 13 aa, Homo sapiens
AEVDAEKPGATDR

SEQ ID NO: 8985 - protein, 15 aa, Homo sapiens
DGDGVPGGGPLSPAR

SEQ ID NO: 8986 - protein, 7 aa, Homo sapiens
DMEDLLR

SEQ ID NO: 8987 - protein, 9 aa, Homo sapiens
DMIPTEMQR

SEQ ID NO: 8988 - protein, 11 aa, Homo sapiens
EILHHVNQAVR

SEQ ID NO: 8989 - protein, 13 aa, Homo sapiens
FCAFVQEAESRPR

SEQ ID NO: 8990 - protein, 15 aa, Homo sapiens
FVQEVVQSQQVAVGR

SEQ ID NO: 8991 - protein, 9 aa, Homo sapiens
GEPQVPDFR

SEQ ID NO: 8992 - protein, 10 aa, Homo sapiens
GLSSILDAAR

SEQ ID NO: 8993 - protein, 19 aa, Homo sapiens
LRPLLSQLGGNSVPQPGCT

SEQ ID NO: 8994 - protein, 10 aa, Homo sapiens
LVHEGPLTWR

SEQ ID NO: 8995 - protein, 17 aa, Homo sapiens
QESGYLIEEIGDVLLAR

SEQ ID NO: 8996 - protein, 8 aa, Homo sapiens
RLDLSHLR

SEQ ID NO: 8997 - protein, 13 aa, Homo sapiens
SAAVVNAIGLYMR

SEQ ID NO: 8998 - protein, 14 aa, Homo sapiens
SGLELEPEEPPGWR

SEQ ID NO: 8999 - protein, 13 aa, Homo sapiens
VPVPPNVAFELDR

SEQ ID NO: 9000 - protein, 18 aa, Homo sapiens
YPLLLQSIGQNTEEPTER

SEQ ID NO: 9001 - protein, 18 aa, Homo sapiens
KGDEVQCEIEELGVIINK

SEQ ID NO: 9002 - protein, 7 aa, Homo sapiens
KPPVFLK

SEQ ID NO: 9003 - protein, 14 aa, Homo sapiens
SEVTFLAPVTRPDK

SEQ ID NO: 9004 - protein, 10 aa, Homo sapiens
DSVADPHNLK

SEQ ID NO: 9005 - protein, 15 aa, Homo sapiens
TFDTFCPLGPALVTK

SEQ ID NO: 9006 - protein, 11 aa, Homo sapiens
ALAAQLPVLPR

SEQ ID NO: 9007 - protein, 20 aa, Homo sapiens
ATDAMAHVAGFTVAHDVSAR

SEQ ID NO: 9008 - protein, 17 aa, Homo sapiens
TMTQFLEQGEATLSVAR

SEQ ID NO: 9009 - protein, 15 aa, Homo sapiens
AGDTLSGTCLLIANK

SEQ ID NO: 9010 - protein, 18 aa, Homo sapiens
ANFWYQPSFHGVDLSALR

SEQ ID NO: 9011 - protein, 10 aa, Homo sapiens
QPVVDTFDIR

SEQ ID NO: 9012 - protein, 15 aa, Homo sapiens
MKPLMGVIYVPLTDK

SEQ ID NO: 9013 - protein, 17 aa, Homo sapiens
MKPLMGVIYVPLTDKEK

SEQ ID NO: 9014 - protein, 26 aa, Homo sapiens
LILPVGPAGGNQMLEQYDKLQDGSIK

SEQ ID NO: 9015 - protein, 8 aa, Homo sapiens
VIGIDHIK

SEQ ID NO: 9016 - protein, 13 aa, Homo sapiens
TDKVFEVMLATDR

SEQ ID NO: 9017 - protein, 11 aa, Homo sapiens
KDDPTLLSSGR

SEQ ID NO: 9018 - protein, 19 aa, Homo sapiens
LILPVGPAGGNQMLEQYDK

SEQ ID NO: 9019 - protein, 17 aa, Homo sapiens
ALDVGSGSGILTACFAR

SEQ ID NO: 9020 - protein, 14 aa, Homo sapiens
SGGASHSELIHNLR

SEQ ID NO: 9021 - protein, 10 aa, Homo sapiens
VFEVMLATDR

SEQ ID NO: 9022 - protein, 9 aa, Homo sapiens
VQLVVGDGR

SEQ ID NO: 9023 - protein, 8 aa, Homo sapiens
LLFDQFMK

SEQ ID NO: 9024 - protein, 12 aa, Homo sapiens
TLYSEATSLFIK

SEQ ID NO: 9025 - protein, 13 aa, Homo sapiens
SLCLGPALIHTAK

SEQ ID NO: 9026 - protein, 8 aa, Homo sapiens
HLMWDLGK

SEQ ID NO: 9027 - protein, 17 aa, Homo sapiens
KVAHSDKPGSTSTASFR

SEQ ID NO: 9028 - protein, 19 aa, Homo sapiens
QDGPMPKPHSVSLNDTETR

SEQ ID NO: 9029 - protein, 11 aa, Homo sapiens
EAKPDELMDSK

SEQ ID NO: 9030 - protein, 14 aa, Homo sapiens
FKGPFTDVVTTNLK

SEQ ID NO: 9031 - protein, 19 aa, Homo sapiens
CVFEMPNENDKLNDMEPSK

SEQ ID NO: 9032 - protein, 20 aa, Homo sapiens
FMVQTIFAPPNTSDMEAVWK

SEQ ID NO: 9033 - protein, 16 aa, Homo sapiens
VAHSDKPGSTSTASFR

SEQ ID NO: 9034 - protein, 9 aa, Homo sapiens
ASASGAMAK

SEQ ID NO: 9035 - protein, 12 aa, Homo sapiens
GPFTDVVTTNLK

SEQ ID NO: 9036 - protein, 7 aa, Homo sapiens
LQGEMMK

SEQ ID NO: 9037 - protein, 14 aa, Homo sapiens
HEQILVLDPPTDLK

SEQ ID NO: 9038 - protein, 8 aa, Homo sapiens
HLRDEGLR

SEQ ID NO: 9039 - protein, 12 aa, Homo sapiens
PHSVSLNDTETR

SEQ ID NO: 9040 - protein, 8 aa, Homo sapiens
VLHGALWK

SEQ ID NO: 9041 - protein, 10 aa, Homo sapiens
ALLPWLLEQR

SEQ ID NO: 9042 - protein, 13 aa, Homo sapiens
TSLAQHFTAGPGR

SEQ ID NO: 9043 - protein, 19 aa, Homo sapiens
VADVVTPLWTVPYAEQLER

SEQ ID NO: 9044 - protein, 10 aa, Homo sapiens
QLILLAQQMK

SEQ ID NO: 9045 - protein, 13 aa, Homo sapiens
NVLLTGATGFLGK

SEQ ID NO: 9046 - protein, 14 aa, Homo sapiens
YVLNEEMSGLPAAR

SEQ ID NO: 9047 - protein, 8 aa, Homo sapiens
PATVFSHK

SEQ ID NO: 9048 - protein, 20 aa, Homo sapiens
LQQDSEIMESSYKEDQMDEK

SEQ ID NO: 9049 - protein, 22 aa, Homo sapiens
FQDSEEITNIELADAFEQMWQK

SEQ ID NO: 9050 - protein, 10 aa, Homo sapiens
KVEITTETIK

SEQ ID NO: 9051 - protein, 16 aa, Homo sapiens
YAEQLPVAQIIHQKPK

SEQ ID NO: 9052 - protein, 34 aa, Homo sapiens
FYSPNIMALASSQVGEDSLSHQPDPAIGVHLMDR

SEQ ID NO: 9053 - protein, 10 aa, Homo sapiens
HVANTLSVYR

SEQ ID NO: 9054 - protein, 21 aa, Homo sapiens
LGIPDSHIVLMLADDMACNPR

SEQ ID NO: 9055 - protein, 12 aa, Homo sapiens
NVLITDFFGSVR

SEQ ID NO: 9056 - protein, 10 aa, Homo sapiens
SLCVSTPGHR

SEQ ID NO: 9057 - protein, 12 aa, Homo sapiens
CNTDDTIGDLKK

SEQ ID NO: 9058 - protein, 14 aa, Homo sapiens
VKCNTDDTIGDLKK

SEQ ID NO: 9059 - protein, 9 aa, Homo sapiens
LIAAQTGTR

SEQ ID NO: 9060 - protein, 9 aa, Homo sapiens
MIEVVCNDR

SEQ ID NO: 9061 - protein, 13 aa, Homo sapiens
VKPNLQTFNTILK

SEQ ID NO: 9062 - protein, 12 aa, Homo sapiens
VMSDFAINQEQK

SEQ ID NO: 9063 - protein, 11 aa, Homo sapiens
LFDQPGDPLKR

SEQ ID NO: 9064 - protein, 12 aa, Homo sapiens
SELLNELMDSAK

SEQ ID NO: 9065 - protein, 16 aa, Homo sapiens
VEGTDVTGIEEVVIPK

SEQ ID NO: 9066 - protein, 13 aa, Homo sapiens
DLELAYQVHGLLK

SEQ ID NO: 9067 - protein, 16 aa, Homo sapiens
AIGIEPSLATYHHIIR

SEQ ID NO: 9068 - protein, 16 aa, Homo sapiens
AYEQALNLYTELLNNR

SEQ ID NO: 9069 - protein, 8 aa, Homo sapiens
FIGPDQHR

SEQ ID NO: 9070 - protein, 10 aa, Homo sapiens
NEHSYCTMIR

SEQ ID NO: 9071 - protein, 13 aa, Homo sapiens
SDLREEILMLMAR

SEQ ID NO: 9072 - protein, 8 aa, Homo sapiens
SPALQVLR

SEQ ID NO: 9073 - protein, 15 aa, Homo sapiens
SSFIIYDIMNELMGK

SEQ ID NO: 9074 - protein, 13 aa, Homo sapiens
VAVLQALASTVNR

SEQ ID NO: 9075 - protein, 10 aa, Homo sapiens
PQTTLEQLQK

SEQ ID NO: 9076 - protein, 28 aa, Homo sapiens
LEDSLWVSLTDQHVQLPMAMTAENLAVK

SEQ ID NO: 9077 - protein, 18 aa, Homo sapiens
AANDAGYFNDEMAPIEVK

SEQ ID NO: 9078 - protein, 9 aa, Homo sapiens
KHNFTPLAR

SEQ ID NO: 9079 - protein, 20 aa, Homo sapiens
QTMQVDEHARPQTTLEQLQK

SEQ ID NO: 9080 - protein, 8 aa, Homo sapiens
SLDLDISK

SEQ ID NO: 9081 - protein, 12 aa, Homo sapiens
RTPFGAYGGLLK

SEQ ID NO: 9082 - protein, 11 aa, Homo sapiens
TPFGAYGGLLK

SEQ ID NO: 9083 - protein, 8 aa, Homo sapiens
GVFVVAAK

SEQ ID NO: 9084 - protein, 13 aa, Homo sapiens
EECDKYALQSQQR

SEQ ID NO: 9085 - protein, 13 aa, Homo sapiens
DFTATDLSEFAAK

SEQ ID NO: 9086 - protein, 20 aa, Homo sapiens
DMDLVEVNEAFAPQYLAVER

SEQ ID NO: 9087 - protein, 21 aa, Homo sapiens
EAEVVLCGGTESMSQAPYCVR

SEQ ID NO: 9088 - protein, 9 aa, Homo sapiens
ETPALTINR

SEQ ID NO: 9089 - protein, 8 aa, Homo sapiens
HNFTPLAR

SEQ ID NO: 9090 - protein, 10 aa, Homo sapiens
ITAHLVHELR

SEQ ID NO: 9091 - protein, 20 aa, Homo sapiens
TNVNGGAIALGHPLGGSGSR

SEQ ID NO: 9092 - protein, 26 aa, Homo sapiens
VSPETVDSVIMGNVLQSSSDAIYLAR

SEQ ID NO: 9093 - protein, 8 aa, Homo sapiens
YALQSQQR

SEQ ID NO: 9094 - protein, 7 aa, Homo sapiens
YTITPVK

SEQ ID NO: 9095 - protein, 25 aa, Homo sapiens
EGDAHPLGALPVGTLINNVESEPGR

SEQ ID NO: 9096 - protein, 14 aa, Homo sapiens
QMQVLETCVATVGR

SEQ ID NO: 9097 - protein, 12 aa, Homo sapiens
SADIALVAGGSR

SEQ ID NO: 9098 - protein, 22 aa, Homo sapiens
WIIATENMQAGDTILNSNHIGR

SEQ ID NO: 9099 - protein, 9 aa, Homo sapiens
DIATIVADK

SEQ ID NO: 9100 - protein, 19 aa, Homo sapiens
GSLEVLNLKDVEEGDEKFE

SEQ ID NO: 9101 - protein, 18 aa, Homo sapiens
KEDLISAFGTDDQTEICK

SEQ ID NO: 9102 - protein, 9 aa, Homo sapiens
FILPVNEGK

SEQ ID NO: 9103 - protein, 8 aa, Homo sapiens
RFEIACYK

SEQ ID NO: 9104 - protein, 10 aa, Homo sapiens
DVEEGDEKFE

SEQ ID NO: 9105 - protein, 10 aa, Homo sapiens
GEVQVSDKER

SEQ ID NO: 9106 - protein, 7 aa, Homo sapiens
DIHYSVK

SEQ ID NO: 9107 - protein, 9 aa, Homo sapiens
HTQLEQMFR

SEQ ID NO: 9108 - protein, 8 aa, Homo sapiens
LTNVAVVR

SEQ ID NO: 9109 - protein, 7 aa, Homo sapiens
FAELSVK

SEQ ID NO: 9110 - protein, 12 aa, Homo sapiens
KLGFTGSTPIGK

SEQ ID NO: 9111 - protein, 10 aa, Homo sapiens
MGMGAVFFNK

SEQ ID NO: 9112 - protein, 25 aa, Homo sapiens
SAACLAAGNTLVLKPAQVTPLTALK

SEQ ID NO: 9113 - protein, 16 aa, Homo sapiens
CGGLQLQNEDVYMATK

SEQ ID NO: 9114 - protein, 8 aa, Homo sapiens
FLFPEGIK

SEQ ID NO: 9115 - protein, 13 aa, Homo sapiens
VVGVFTVPDKDGK

SEQ ID NO: 9116 - protein, 8 aa, Homo sapiens
YFAGWCDK

SEQ ID NO: 9117 - protein, 10 aa, Homo sapiens
LLQYCETGVK

SEQ ID NO: 9118 - protein, 13 aa, Homo sapiens
SPLIIFNDCELDK

SEQ ID NO: 9119 - protein, 15 aa, Homo sapiens
GEDQEVELVVDYISK

SEQ ID NO: 9120 - protein, 11 aa, Homo sapiens
VSYASLADVDK

SEQ ID NO: 9121 - protein, 24 aa, Homo sapiens
MIPASQYFSTGETSVVELTAEEVK

SEQ ID NO: 9122 - protein, 11 aa, Homo sapiens
TDVAAPFGGVK

SEQ ID NO: 9123 - protein, 12 aa, Homo sapiens
EESFGPIMVISK

SEQ ID NO: 9124 - protein, 12 aa, Homo sapiens
DLGEEALNEYLK

SEQ ID NO: 9125 - protein, 8 aa, Homo sapiens
NLQFEDGK

SEQ ID NO: 9126 - protein, 15 aa, Homo sapiens
ANSTEYGLASGVFTR

SEQ ID NO: 9127 - protein, 10 aa, Homo sapiens
DAFENGEWGR

SEQ ID NO: 9128 - protein, 19 aa, Homo sapiens
ENAEISWDQSAEVLHNWIR

SEQ ID NO: 9129 - protein, 16 aa, Homo sapiens
GVINIIPGSGGIAGQR

SEQ ID NO: 9130 - protein, 15 aa, Homo sapiens
IQGSTIPINQARPNR

SEQ ID NO: 9131 - protein, 18 aa, Homo sapiens
LALIGQSLFGQEVYSHLR

SEQ ID NO: 9132 - protein, 11 aa, Homo sapiens
LGFTGSTPIGK

SEQ ID NO: 9133 - protein, 8 aa, Homo sapiens
LSEHPDIR

SEQ ID NO: 9134 - protein, 16 aa, Homo sapiens
SCDVEPNDTVDALYNR

SEQ ID NO: 9135 - protein, 20 aa, Homo sapiens
DMAAFNERPIIFALSNPTSK

SEQ ID NO: 9136 - protein, 9 aa, Homo sapiens
FAHEHEEMK

SEQ ID NO: 9137 - protein, 11 aa, Homo sapiens
TATVYPEPQNK

SEQ ID NO: 9138 - protein, 21 aa, Homo sapiens
QITDNIFLTTAEVIAQQVSDK

SEQ ID NO: 9139 - protein, 22 aa, Homo sapiens
QQLNIHGLLPPSFNSQEIQVLR

SEQ ID NO: 9140 - protein, 10 aa, Homo sapiens
YLLLMDLQDR

SEQ ID NO: 9141 - protein, 22 aa, Homo sapiens
KTQTVCNFTDGALVQHQEWDGK

SEQ ID NO: 9142 - protein, 21 aa, Homo sapiens
TTQFSCTLGEKFEETTADGRK

SEQ ID NO: 9143 - protein, 10 aa, Homo sapiens
ELGVGIALRK

SEQ ID NO: 9144 - protein, 16 aa, Homo sapiens
MGAMAKPDCIITCDGK

SEQ ID NO: 9145 - protein, 11 aa, Homo sapiens
TTQFSCTLGEK

SEQ ID NO: 9146 - protein, 20 aa, Homo sapiens
TTQFSCTLGEKFEETTADGR

SEQ ID NO: 9147 - protein, 7 aa, Homo sapiens
GFDEYMK

SEQ ID NO: 9148 - protein, 16 aa, Homo sapiens
GFDEYMKELGVGIALR

SEQ ID NO: 9149 - protein, 27 aa, Homo sapiens
TQTVCNFTDGALVQHQEWDGKESTITR

SEQ ID NO: 9150 - protein, 10 aa, Homo sapiens
PDCIITCDGK

SEQ ID NO: 9151 - protein, 10 aa, Homo sapiens
FEETTADGRK

SEQ ID NO: 9152 - protein, 21 aa, Homo sapiens
TQTVCNFTDGALVQHQEWDGK

SEQ ID NO: 9153 - protein, 17 aa, Homo sapiens
KMGAMAKPDCIITCDGK

SEQ ID NO: 9154 - protein, 9 aa, Homo sapiens
ATVQQLEGR

SEQ ID NO: 9155 - protein, 9 aa, Homo sapiens
ELGVGIALR

SEQ ID NO: 9156 - protein, 9 aa, Homo sapiens
FEETTADGR

SEQ ID NO: 9157 - protein, 14 aa, Homo sapiens
LVVECVMNNVTCTR

SEQ ID NO: 9158 - protein, 15 aa, Homo sapiens
AGHQLQHDLFFDTLK

SEQ ID NO: 9159 - protein, 10 aa, Homo sapiens
LPCEMDFSGK

SEQ ID NO: 9160 - protein, 16 aa, Homo sapiens
SAHGTNPASAHMAGMK

SEQ ID NO: 9161 - protein, 25 aa, Homo sapiens
DVSGVLFQYPDTEGKVEDFTELVER

SEQ ID NO: 9162 - protein, 20 aa, Homo sapiens
MEDPVCENEILATLHAISSK

SEQ ID NO: 9163 - protein, 11 aa, Homo sapiens
SANIEAVDVAK

SEQ ID NO: 9164 - protein, 9 aa, Homo sapiens
YTGVLTELK

SEQ ID NO: 9165 - protein, 13 aa, Homo sapiens
LNSSSELAPITWK

SEQ ID NO: 9166 - protein, 10 aa, Homo sapiens
YGNIDAVHLK

SEQ ID NO: 9167 - protein, 17 aa, Homo sapiens
DISLVHSMIPLGSCTMK

SEQ ID NO: 9168 - protein, 19 aa, Homo sapiens
TFCIPHGGGGPGMGPIGVK

SEQ ID NO: 9169 - protein, 22 aa, Homo sapiens
EFANIHPFVPLDQAQGYQQLFR

SEQ ID NO: 9170 - protein, 23 aa, Homo sapiens
NLLENSGWITQYTPYQPEVSQGR

SEQ ID NO: 9171 - protein, 18 aa, Homo sapiens
SYIGMGYYNCSVPQTILR

SEQ ID NO: 9172 - protein, 21 aa, Homo sapiens
TSPFLTHQVFNSYHSETNIVR

SEQ ID NO: 9173 - protein, 10 aa, Homo sapiens
VEDFTELVER

SEQ ID NO: 9174 - protein, 22 aa, Homo sapiens
IIPAIATTTATVSGLVALEMIK

SEQ ID NO: 9175 - protein, 16 aa, Homo sapiens
DKFESSFSHKPSLFNK

SEQ ID NO: 9176 - protein, 13 aa, Homo sapiens
KPDHVPISSEDER

SEQ ID NO: 9177 - protein, 15 aa, Homo sapiens
IQSGHSLEGCFQVIK

SEQ ID NO: 9178 - protein, 9 aa, Homo sapiens
IQEFKPSNK

SEQ ID NO: 9179 - protein, 13 aa, Homo sapiens
EDFTLLDFINAVK

SEQ ID NO: 9180 - protein, 12 aa, Homo sapiens
MLYVPVMPGHAK

SEQ ID NO: 9181 - protein, 12 aa, Homo sapiens
LKDGSLFWQSPK

SEQ ID NO: 9182 - protein, 11 aa, Homo sapiens
VTGGYPFEAYK

SEQ ID NO: 9183 - protein, 21 aa, Homo sapiens
CQAWDLGTNFFLSEDDVVNKR

SEQ ID NO: 9184 - protein, 11 aa, Homo sapiens
NFALLGVGTSK

SEQ ID NO: 9185 - protein, 20 aa, Homo sapiens
LFCDFGDEFEVLDTTGEEPK

SEQ ID NO: 9186 - protein, 10 aa, Homo sapiens
ACIGDTLCQK

SEQ ID NO: 9187 - protein, 17 aa, Homo sapiens
FDLNEPLHLSFLQNAAK

SEQ ID NO: 9188 - protein, 14 aa, Homo sapiens
FWQTYSSAEEVLQK

SEQ ID NO: 9189 - protein, 29 aa, Homo sapiens
HIAELNPYVHVTSSSVPFNETTDLSFLDK

SEQ ID NO: 9190 - protein, 13 aa, Homo sapiens
YGIEPTMVVQGVK

SEQ ID NO: 9191 - protein, 8 aa, Homo sapiens
NLVLAGIK

SEQ ID NO: 9192 - protein, 17 aa, Homo sapiens
CLANLRPLLDSGTMGTK

SEQ ID NO: 9193 - protein, 13 aa, Homo sapiens
GMITVTDPDLIEK

SEQ ID NO: 9194 - protein, 16 aa, Homo sapiens
VCPTTETIYNDEFYTK

SEQ ID NO: 9195 - protein, 10 aa, Homo sapiens
YQCVVLTEMK

SEQ ID NO: 9196 - protein, 10 aa, Homo sapiens
YVLGDTAMQK

SEQ ID NO: 9197 - protein, 13 aa, Homo sapiens
ALQLLHCFPLDIR

SEQ ID NO: 9198 - protein, 12 aa, Homo sapiens
FISADVHGIWSR

SEQ ID NO: 9199 - protein, 10 aa, Homo sapiens
LETGQFLTFR

SEQ ID NO: 9200 - protein, 9 aa, Homo sapiens
MYSIEPADR

SEQ ID NO: 9201 - protein, 19 aa, Homo sapiens
NLPIMSTASVEIDDALYSR

SEQ ID NO: 9202 - protein, 10 aa, Homo sapiens
NWSQCVELAR

SEQ ID NO: 9203 - protein, 14 aa, Homo sapiens
QDVIITALDNVEAR

SEQ ID NO: 9204 - protein, 14 aa, Homo sapiens
SFPAAIEHTIQWAR

SEQ ID NO: 9205 - protein, 9 aa, Homo sapiens
TVFFESLER

SEQ ID NO: 9206 - protein, 8 aa, Homo sapiens
YYFSHDTD

SEQ ID NO: 9207 - protein, 11 aa, Homo sapiens
KFPFCDGAHTK

SEQ ID NO: 9208 - protein, 13 aa, Homo sapiens
IVHAFDMEDLGDK

SEQ ID NO: 9209 - protein, 15 aa, Homo sapiens
HNEETGDNVGPLIIK

SEQ ID NO: 9210 - protein, 9 aa, Homo sapiens
AMINLHIQK

SEQ ID NO: 9211 - protein, 10 aa, Homo sapiens
FPFCDGAHTK

SEQ ID NO: 9212 - protein, 18 aa, Homo sapiens
IVHAFDMEDLGDKAVYCR

SEQ ID NO: 9213 - protein, 9 aa, Homo sapiens
SLTSSSSVR

SEQ ID NO: 9214 - protein, 15 aa, Homo sapiens
SAEQGEVENGRCITK

SEQ ID NO: 9215 - protein, 19 aa, Homo sapiens
ADEALFLLLHNEMVSGVYK

SEQ ID NO: 9216 - protein, 8 aa, Homo sapiens
HKSEFFEK

SEQ ID NO: 9217 - protein, 18 aa, Homo sapiens
IHEAIIQSPPIDYFDVFK

SEQ ID NO: 9218 - protein, 21 aa, Homo sapiens
AVVPASLSGQDVGSFAYLTIK

SEQ ID NO: 9219 - protein, 16 aa, Homo sapiens
TIEDLDENQLKDEFFK

SEQ ID NO: 9220 - protein, 7 aa, Homo sapiens
AHLILFK

SEQ ID NO: 9221 - protein, 7 aa, Homo sapiens
VIDTLHR

SEQ ID NO: 9222 - protein, 10 aa, Homo sapiens
YGIFQYDGPL

SEQ ID NO: 9223 - protein, 13 aa, Homo sapiens
LLLTAQQMLQDSK

SEQ ID NO: 9224 - protein, 13 aa, Homo sapiens
LDNLLLDTEGYVK

SEQ ID NO: 9225 - protein, 16 aa, Homo sapiens
DLKLDNLLLDTEGYVK

SEQ ID NO: 9226 - protein, 29 aa, Homo sapiens
DLPETIPWNPTPSMGGPGTPDSRPPFLSR

SEQ ID NO: 9227 - protein, 11 aa, Homo sapiens
FLSAEAIGIMR

SEQ ID NO: 9228 - protein, 22 aa, Homo sapiens
LIPNATGTGTFSPGASPGSEAR

SEQ ID NO: 9229 - protein, 13 aa, Homo sapiens
LNLGTDSDSSPQK

SEQ ID NO: 9230 - protein, 11 aa, Homo sapiens
QMNIDVATWVR

SEQ ID NO: 9231 - protein, 10 aa, Homo sapiens
SLGPVELLLR

SEQ ID NO: 9232 - protein, 10 aa, Homo sapiens
TLGWEALLAR

SEQ ID NO: 9233 - protein, 12 aa, Homo sapiens
EILDKFTEEVVK

SEQ ID NO: 9234 - protein, 12 aa, Homo sapiens
GIKPVTLELGGK

SEQ ID NO: 9235 - protein, 16 aa, Homo sapiens
EREDEIATMECINNGK

SEQ ID NO: 9236 - protein, 10 aa, Homo sapiens
EVNLAVQNAK

SEQ ID NO: 9237 - protein, 7 aa, Homo sapiens
FTEEVVK

SEQ ID NO: 9238 - protein, 11 aa, Homo sapiens
VEPADASGTEK

SEQ ID NO: 9239 - protein, 10 aa, Homo sapiens
VTIEYYSQLK

SEQ ID NO: 9240 - protein, 16 aa, Homo sapiens
SPLIIFSDCDMNNAVK

SEQ ID NO: 9241 - protein, 12 aa, Homo sapiens
VSFTGSVPTGMK

SEQ ID NO: 9242 - protein, 14 aa, Homo sapiens
VLCGGDIYVPEDPK

SEQ ID NO: 9243 - protein, 11 aa, Homo sapiens
VIATFTCSGEK

SEQ ID NO: 9244 - protein, 8 aa, Homo sapiens
AFEPATGR

SEQ ID NO: 9245 - protein, 15 aa, Homo sapiens
ANDTTFGLAAGVFTR

SEQ ID NO: 9246 - protein, 7 aa, Homo sapiens
ILLEAAR

SEQ ID NO: 9247 - protein, 12 aa, Homo sapiens
LFTEVEGTCTGK

SEQ ID NO: 9248 - protein, 8 aa, Homo sapiens
GFVLYPVK

SEQ ID NO: 9249 - protein, 19 aa, Homo sapiens
HSIPSEMEFDPNSNPPCYK

SEQ ID NO: 9250 - protein, 11 aa, Homo sapiens
YFGPNLLNTVK

SEQ ID NO: 9251 - protein, 8 aa, Homo sapiens
AIVFRPFK

SEQ ID NO: 9252 - protein, 13 aa, Homo sapiens
GEVVDAVVTQVNK

SEQ ID NO: 9253 - protein, 15 aa, Homo sapiens
TMDEDIVIQQDDEIR

SEQ ID NO: 9254 - protein, 21 aa, Homo sapiens
VDKNDIFAIGSLMDDYLGLVS

SEQ ID NO: 9255 - protein, 16 aa, Homo sapiens
VGLFTEIGPMSCFISR

SEQ ID NO: 9256 - protein, 10 aa, Homo sapiens
NCAVSCAGEK

SEQ ID NO: 9257 - protein, 7 aa, Homo sapiens
NQLLTLK

SEQ ID NO: 9258 - protein, 11 aa, Homo sapiens
HLEVLNVSENK

SEQ ID NO: 9259 - protein, 14 aa, Homo sapiens
VPVSDLLLSYESPK

SEQ ID NO: 9260 - protein, 22 aa, Homo sapiens
FAGVVPPVAGPWLGVEWDNPER

SEQ ID NO: 9261 - protein, 11 aa, Homo sapiens
SDTLTADVIGR

SEQ ID NO: 9262 - protein, 10 aa, Homo sapiens
RYEDQELTGK

SEQ ID NO: 9263 - protein, 7 aa, Homo sapiens
LLAIQAK

SEQ ID NO: 9264 - protein, 12 aa, Homo sapiens
LVDTAWLEIMTK

SEQ ID NO: 9265 - protein, 9 aa, Homo sapiens
LHTNFHIPK

SEQ ID NO: 9266 - protein, 13 aa, Homo sapiens
YAVGEECDFEVGK

SEQ ID NO: 9267 - protein, 18 aa, Homo sapiens
AGTGENAPWVVEDELVKK

SEQ ID NO: 9268 - protein, 9 aa, Homo sapiens
YMTLNPSTK

SEQ ID NO: 9269 - protein, 10 aa, Homo sapiens
FSDFLLDPYK

SEQ ID NO: 9270 - protein, 11 aa, Homo sapiens
SPEEHLEEMMK

SEQ ID NO: 9271 - protein, 13 aa, Homo sapiens
QGQNLWFLCDSQK

SEQ ID NO: 9272 - protein, 17 aa, Homo sapiens
FEPQVDTEAEDMISAVK

SEQ ID NO: 9273 - protein, 10 aa, Homo sapiens
SVQEFLTDMK

SEQ ID NO: 9274 - protein, 17 aa, Homo sapiens
AGTGENAPWVVEDELVK

SEQ ID NO: 9275 - protein, 9 aa, Homo sapiens
YEDQELTGK

SEQ ID NO: 9276 - protein, 22 aa, Homo sapiens
DEAEDYYDVITHPMDFQTVQNK

SEQ ID NO: 9277 - protein, 17 aa, Homo sapiens
APPVDDAEVDELVLQTK

SEQ ID NO: 9278 - protein, 15 aa, Homo sapiens
YWLFSDEVPGLFIEK

SEQ ID NO: 9279 - protein, 11 aa, Homo sapiens
TEQCLVALLHK

SEQ ID NO: 9280 - protein, 14 aa, Homo sapiens
LETSEFFELTSEEK

SEQ ID NO: 9281 - protein, 9 aa, Homo sapiens
SALSCVISK

SEQ ID NO: 9282 - protein, 13 aa, Homo sapiens
DHTVSGDEDYCPR

SEQ ID NO: 9283 - protein, 15 aa, Homo sapiens
ELDELLNCLHPQGIR

SEQ ID NO: 9284 - protein, 8 aa, Homo sapiens
GGFLYLNR

SEQ ID NO: 9285 - protein, 15 aa, Homo sapiens
GGLGYVEETSEFEAR

SEQ ID NO: 9286 - protein, 14 aa, Homo sapiens
HLPPAALHLIAYYK

SEQ ID NO: 9287 - protein, 9 aa, Homo sapiens
HSVIPPAAR

SEQ ID NO: 9288 - protein, 12 aa, Homo sapiens
IISNVPADSLIR

SEQ ID NO: 9289 - protein, 17 aa, Homo sapiens
LAEDEGDSEPEAVGQSR

SEQ ID NO: 9290 - protein, 7 aa, Homo sapiens
LLSSEDR

SEQ ID NO: 9291 - protein, 10 aa, Homo sapiens
LQILTALCHR

SEQ ID NO: 9292 - protein, 16 aa, Homo sapiens
LSEIPLTLHSVSELVR

SEQ ID NO: 9293 - protein, 12 aa, Homo sapiens
QVFTNAEVYNCR

SEQ ID NO: 9294 - protein, 13 aa, Homo sapiens
SCDGNQELLNFLR

SEQ ID NO: 9295 - protein, 9 aa, Homo sapiens
SDLIEVATR

SEQ ID NO: 9296 - protein, 9 aa, Homo sapiens
WASMSEEQR

SEQ ID NO: 9297 - protein, 12 aa, Homo sapiens
YQDIIHSIHLAR

SEQ ID NO: 9298 - protein, 10 aa, Homo sapiens
LPLVVEDFVK

SEQ ID NO: 9299 - protein, 13 aa, Homo sapiens
AMEFVDVTESNAR

SEQ ID NO: 9300 - protein, 24 aa, Homo sapiens
YHALLIPSCPGALTDLASSGSLAR

SEQ ID NO: 9301 - protein, 8 aa, Homo sapiens
IYQYVINK

SEQ ID NO: 9302 - protein, 7 aa, Homo sapiens
YHEAWQK

SEQ ID NO: 9303 - protein, 12 aa, Homo sapiens
LLETCSIALVGK

SEQ ID NO: 9304 - protein, 14 aa, Homo sapiens
YILVTGGVISGIGK

SEQ ID NO: 9305 - protein, 8 aa, Homo sapiens
FEVNPVWK

SEQ ID NO: 9306 - protein, 10 aa, Homo sapiens
HRFEVNPVWK

SEQ ID NO: 9307 - protein, 12 aa, Homo sapiens
KLYGDADYLEER

SEQ ID NO: 9308 - protein, 10 aa, Homo sapiens
SCGLHVTSIK

SEQ ID NO: 9309 - protein, 10 aa, Homo sapiens
FSDSYASVIK

SEQ ID NO: 9310 - protein, 12 aa, Homo sapiens
GIIASSVGTILK

SEQ ID NO: 9311 - protein, 18 aa, Homo sapiens
PIKPSPPYFGLLLASVGR

SEQ ID NO: 9312 - protein, 7 aa, Homo sapiens
LSHYLQK

SEQ ID NO: 9313 - protein, 21 aa, Homo sapiens
ENFCNIHVSLVPQPSSTGEQK

SEQ ID NO: 9314 - protein, 8 aa, Homo sapiens
CLEEQGLK

SEQ ID NO: 9315 - protein, 12 aa, Homo sapiens
ALEHSALAINHK

SEQ ID NO: 9316 - protein, 10 aa, Homo sapiens
FVGQDVEGER

SEQ ID NO: 9317 - protein, 8 aa, Homo sapiens
IQAIAWAR

SEQ ID NO: 9318 - protein, 16 aa, Homo sapiens
LCSAHGVLVPGGFGVR

SEQ ID NO: 9319 - protein, 11 aa, Homo sapiens
LYGDADYLEER

SEQ ID NO: 9320 - protein, 8 aa, Homo sapiens
RLDLPIER

SEQ ID NO: 9321 - protein, 18 aa, Homo sapiens
TVQVVPHITDAIQEWVMR

SEQ ID NO: 9322 - protein, 16 aa, Homo sapiens
VPLLLEEQGVVDYFLR

SEQ ID NO: 9323 - protein, 18 aa, Homo sapiens
YIDSADLEPITSQEEPVR

SEQ ID NO: 9324 - protein, 11 aa, Homo sapiens
GCYFVLDWLQK

SEQ ID NO: 9325 - protein, 13 aa, Homo sapiens
AMGQGLPDEEQEK

SEQ ID NO: 9326 - protein, 9 aa, Homo sapiens
FSAGQWEAR

SEQ ID NO: 9327 - protein, 8 aa, Homo sapiens
FVNLISER

SEQ ID NO: 9328 - protein, 16 aa, Homo sapiens
GALQGSAWQVSSEDVR

SEQ ID NO: 9329 - protein, 14 aa, Homo sapiens
GLHSQNFTQALLER

SEQ ID NO: 9330 - protein, 12 aa, Homo sapiens
LFNCSASLDWPR

SEQ ID NO: 9331 - protein, 14 aa, Homo sapiens
LLDVTGGLGTDELR

SEQ ID NO: 9332 - protein, 20 aa, Homo sapiens
MLSELPALGISGIRPTYILR

SEQ ID NO: 9333 - protein, 17 aa, Homo sapiens
SGNELPLAVASTADLIR

SEQ ID NO: 9334 - protein, 11 aa, Homo sapiens
KLLDIEGLYSK

SEQ ID NO: 9335 - protein, 15 aa, Homo sapiens
VHNLITDFLALMPMK

SEQ ID NO: 9336 - protein, 13 aa, Homo sapiens
FQDDNVEGDKVSK

SEQ ID NO: 9337 - protein, 8 aa, Homo sapiens
LQDSQLWK

SEQ ID NO: 9338 - protein, 26 aa, Homo sapiens
LQNVEQLPPDEIKELCQSVMPAGVDK

SEQ ID NO: 9339 - protein, 10 aa, Homo sapiens
LLDIEGLYSK

SEQ ID NO: 9340 - protein, 14 aa, Homo sapiens
TLQSLLTPQPPLLK

SEQ ID NO: 9341 - protein, 13 aa, Homo sapiens
AQIEQVIANCEHK

SEQ ID NO: 9342 - protein, 9 aa, Homo sapiens
DILQDVHDK

SEQ ID NO: 9343 - protein, 18 aa, Homo sapiens
TSQDFLFSQLQYLPFSNK

SEQ ID NO: 9344 - protein, 12 aa, Homo sapiens
TCLHAILNILEK

SEQ ID NO: 9345 - protein, 13 aa, Homo sapiens
FTDELMEQGLTYK

SEQ ID NO: 9346 - protein, 17 aa, Homo sapiens
ATPLAVNSAASLWGPYK

SEQ ID NO: 9347 - protein, 11 aa, Homo sapiens
QLDTYAPFPGK

SEQ ID NO: 9348 - protein, 10 aa, Homo sapiens
KADNVVNIAR

SEQ ID NO: 9349 - protein, 13 aa, Homo sapiens
SVSGFLHFDTATK

SEQ ID NO: 9350 - protein, 15 aa, Homo sapiens
AVQHCLALLNLTLQK

SEQ ID NO: 9351 - protein, 28 aa, Homo sapiens
SGLAIVSQHDLDQLQADAINAFGESLQK

SEQ ID NO: 9352 - protein, 16 aa, Homo sapiens
QMGDLLPPTIYIPYLK

SEQ ID NO: 9353 - protein, 10 aa, Homo sapiens
LTAPEDVFSK

SEQ ID NO: 9354 - protein, 17 aa, Homo sapiens
YLYHGNTNPELAFESAK

SEQ ID NO: 9355 - protein, 14 aa, Homo sapiens
LVGDFTHDQSISQK

SEQ ID NO: 9356 - protein, 10 aa, Homo sapiens
HKPDFISLFK

SEQ ID NO: 9357 - protein, 15 aa, Homo sapiens
QQQWLLYLSNSGYLK

SEQ ID NO: 9358 - protein, 15 aa, Homo sapiens
ASTEGVAIQGQQGTR

SEQ ID NO: 9359 - protein, 8 aa, Homo sapiens
CEEYPLTR

SEQ ID NO: 9360 - protein, 21 aa, Homo sapiens
CQDVSAGSLQELALLTGIISK

SEQ ID NO: 9361 - protein, 10 aa, Homo sapiens
DACDGHEIGR

SEQ ID NO: 9362 - protein, 14 aa, Homo sapiens
DLEHLMLLIGELYK

SEQ ID NO: 9363 - protein, 11 aa, Homo sapiens
DLPSADSVQYR

SEQ ID NO: 9364 - protein, 12 aa, Homo sapiens
DPPMFIPTPVDR

SEQ ID NO: 9365 - protein, 12 aa, Homo sapiens
EDTLLLIGHLER

SEQ ID NO: 9366 - protein, 9 aa, Homo sapiens
ENLFMDLLR

SEQ ID NO: 9367 - protein, 22 aa, Homo sapiens
HLEYYLLHCMPTDSQDSLFASR

SEQ ID NO: 9368 - protein, 10 aa, Homo sapiens
IQQGALELLR

SEQ ID NO: 9369 - protein, 22 aa, Homo sapiens
LAQCQVYDMRPETDPQSMFGMR

SEQ ID NO: 9370 - protein, 8 aa, Homo sapiens
LAWALALR

SEQ ID NO: 9371 - protein, 9 aa, Homo sapiens
LPGLQATVR

SEQ ID NO: 9372 - protein, 14 aa, Homo sapiens
LQDSFASETNLDFR

SEQ ID NO: 9373 - protein, 8 aa, Homo sapiens
QCLGLLSR

SEQ ID NO: 9374 - protein, 12 aa, Homo sapiens
QDTQAPVVPYWR

SEQ ID NO: 9375 - protein, 14 aa, Homo sapiens
QSANDFFSYYDSHR

SEQ ID NO: 9376 - protein, 18 aa, Homo sapiens
QSLAESLFAWACQSPLGK

SEQ ID NO: 9377 - protein, 11 aa, Homo sapiens
VLVDSLVEDDR

SEQ ID NO: 9378 - protein, 9 aa, Homo sapiens
YSFIQALVR

SEQ ID NO: 9379 - protein, 10 aa, Homo sapiens
YLQSVRPLMK

SEQ ID NO: 9380 - protein, 7 aa, Homo sapiens
IWMGMVK

SEQ ID NO: 9381 - protein, 28 aa, Homo sapiens
AAFFVTLDETEEGYRSEDPDTSMDSYAK

SEQ ID NO: 9382 - protein, 10 aa, Homo sapiens
YLAVESPFLK

SEQ ID NO: 9383 - protein, 17 aa, Homo sapiens
TSPDAFVQLALQLAHYK

SEQ ID NO: 9384 - protein, 17 aa, Homo sapiens
EAMTDIITLFGLSSNSK

SEQ ID NO: 9385 - protein, 13 aa, Homo sapiens
TLETANCMSSQTK

SEQ ID NO: 9386 - protein, 8 aa, Homo sapiens
QSLDAVEK

SEQ ID NO: 9387 - protein, 10 aa, Homo sapiens
IDPSLGIIAK

SEQ ID NO: 9388 - protein, 13 aa, Homo sapiens
KPMLYSFQTSLPR

SEQ ID NO: 9389 - protein, 7 aa, Homo sapiens
LPVPAVK

SEQ ID NO: 9390 - protein, 13 aa, Homo sapiens
SEDPDTSMDSYAK

SEQ ID NO: 9391 - protein, 15 aa, Homo sapiens
AAFFVTLDETEEGYR

SEQ ID NO: 9392 - protein, 12 aa, Homo sapiens
AGNAIHAILLYR

SEQ ID NO: 9393 - protein, 12 aa, Homo sapiens
AMVDPAQTVEQR

SEQ ID NO: 9394 - protein, 12 aa, Homo sapiens
GDINPNIPYPTR

SEQ ID NO: 9395 - protein, 14 aa, Homo sapiens
ILDNTSEPQPGEAR

SEQ ID NO: 9396 - protein, 13 aa, Homo sapiens
IPGEETDTIQHMR

SEQ ID NO: 9397 - protein, 9 aa, Homo sapiens
LAALTAGDR

SEQ ID NO: 9398 - protein, 14 aa, Homo sapiens
LAALTAGDRVPWAR

SEQ ID NO: 9399 - protein, 10 aa, Homo sapiens
LAMTGSGIDR

SEQ ID NO: 9400 - protein, 15 aa, Homo sapiens
LLGSTIPLCSAQWER

SEQ ID NO: 9401 - protein, 15 aa, Homo sapiens
MTALAQDFAVGLGPR

SEQ ID NO: 9402 - protein, 11 aa, Homo sapiens
SCTTESCDFVR

SEQ ID NO: 9403 - protein, 9 aa, Homo sapiens
EASFDGISK

SEQ ID NO: 9404 - protein, 17 aa, Homo sapiens
AVMGAMKPGVWWPDMHR

SEQ ID NO: 9405 - protein, 28 aa, Homo sapiens
YAVDDVQYVDEIASVLTSQKPSVLLTLR

SEQ ID NO: 9406 - protein, 16 aa, Homo sapiens
AAATGPSFWLGNETLK

SEQ ID NO: 9407 - protein, 11 aa, Homo sapiens
LPASHATWMGK

SEQ ID NO: 9408 - protein, 14 aa, Homo sapiens
TVEEIEACMAGCDK

SEQ ID NO: 9409 - protein, 8 aa, Homo sapiens
AVYEAVLR

SEQ ID NO: 9410 - protein, 15 aa, Homo sapiens
EYELESLFEHYCYSR

SEQ ID NO: 9411 - protein, 16 aa, Homo sapiens
FEVNNTILHPEIVECR

SEQ ID NO: 9412 - protein, 11 aa, Homo sapiens
GVNTDSGSVCR

SEQ ID NO: 9413 - protein, 7 aa, Homo sapiens
IDEPGLR

SEQ ID NO: 9414 - protein, 20 aa, Homo sapiens
NPAVQAGSIVVLQGGEETQR

SEQ ID NO: 9415 - protein, 7 aa, Homo sapiens
STLFVPR

SEQ ID NO: 9416 - protein, 9 aa, Homo sapiens
TDMELEVLR

SEQ ID NO: 9417 - protein, 10 aa, Homo sapiens
VPLALFALNR

SEQ ID NO: 9418 - protein, 10 aa, Homo sapiens
YCTDTGVLFR

SEQ ID NO: 9419 - protein, 8 aa, Homo sapiens
EHDQLIEK

SEQ ID NO: 9420 - protein, 9 aa, Homo sapiens
QLYLPMLFK

SEQ ID NO: 9421 - protein, 10 aa, Homo sapiens
LNMILVQILK

SEQ ID NO: 9422 - protein, 9 aa, Homo sapiens
DLLGLCEQK

SEQ ID NO: 9423 - protein, 7 aa, Homo sapiens
FLVTVIK

SEQ ID NO: 9424 - protein, 12 aa, Homo sapiens
SAFPHLQDAQVK

SEQ ID NO: 9425 - protein, 22 aa, Homo sapiens
LFEFMHETHDGVQDMACDTFIK

SEQ ID NO: 9426 - protein, 14 aa, Homo sapiens
VDTILEFSQNMNTK

SEQ ID NO: 9427 - protein, 14 aa, Homo sapiens
FLNWIPLGYIFETK

SEQ ID NO: 9428 - protein, 12 aa, Homo sapiens
NVDILKDPETVK

SEQ ID NO: 9429 - protein, 10 aa, Homo sapiens
TSSDPTCVEK

SEQ ID NO: 9430 - protein, 10 aa, Homo sapiens
MAQEVLTHLK

SEQ ID NO: 9431 - protein, 8 aa, Homo sapiens
LISTLIYK

SEQ ID NO: 9432 - protein, 18 aa, Homo sapiens
YMLLPNQVWDSIIQQATK

SEQ ID NO: 9433 - protein, 8 aa, Homo sapiens
YVVGLIIK

SEQ ID NO: 9434 - protein, 14 aa, Homo sapiens
EPEVLSTMAIIVNK

SEQ ID NO: 9435 - protein, 13 aa, Homo sapiens
LHNQVNGTEWSWK

SEQ ID NO: 9436 - protein, 23 aa, Homo sapiens
NLNTLCWAIGSISGAMHEEDEKR

SEQ ID NO: 9437 - protein, 10 aa, Homo sapiens
IYLDMLNVYK

SEQ ID NO: 9438 - protein, 14 aa, Homo sapiens
TSESLCQNNMVILK

SEQ ID NO: 9439 - protein, 7 aa, Homo sapiens
DFLVQIK

SEQ ID NO: 9440 - protein, 12 aa, Homo sapiens
YYGLQILENVIK

SEQ ID NO: 9441 - protein, 8 aa, Homo sapiens
QLLDFSQK

SEQ ID NO: 9442 - protein, 36 aa, Homo sapiens
ATGSAQDGAVVTPSRPLGDTLTVSEAETDPGDVLGR

SEQ ID NO: 9443 - protein, 9 aa, Homo sapiens
DTDSINLYK

SEQ ID NO: 9444 - protein, 19 aa, Homo sapiens
MAKPEEVLVVENDQGEVVR

SEQ ID NO: 9445 - protein, 18 aa, Homo sapiens
LLSEEVFDFSSGQITQVK

SEQ ID NO: 9446 - protein, 26 aa, Homo sapiens
ISTSLNPGNPVNNQIFLQEYVANLLK

SEQ ID NO: 9447 - protein, 16 aa, Homo sapiens
AIIASNIMYIVGQYPR

SEQ ID NO: 9448 - protein, 12 aa, Homo sapiens
AVGHPFVIQLGR

SEQ ID NO: 9449 - protein, 9 aa, Homo sapiens
DFEEYPEHR

SEQ ID NO: 9450 - protein, 15 aa, Homo sapiens
EFAGEDTSDLFLEER

SEQ ID NO: 9451 - protein, 8 aa, Homo sapiens
EHPDAWTR

SEQ ID NO: 9452 - protein, 23 aa, Homo sapiens
ESPFSTSASPLLSGSQHFDVPPR

SEQ ID NO: 9453 - protein, 16 aa, Homo sapiens
ETLVYLTHLDYVDTER

SEQ ID NO: 9454 - protein, 8 aa, Homo sapiens
FLNVPMFR

SEQ ID NO: 9455 - protein, 14 aa, Homo sapiens
HWPTFISDIVGASR

SEQ ID NO: 9456 - protein, 22 aa, Homo sapiens
LDINLLDNVVNCLYHGEGAQQR

SEQ ID NO: 9457 - protein, 8 aa, Homo sapiens
LISGWVSR

SEQ ID NO: 9458 - protein, 11 aa, Homo sapiens
LVLDSIIWAFK

SEQ ID NO: 9459 - protein, 10 aa, Homo sapiens
QMLPLNTNIR

SEQ ID NO: 9460 - protein, 19 aa, Homo sapiens
QMSVPGIFNPHEIPEEMCD

SEQ ID NO: 9461 - protein, 25 aa, Homo sapiens
SNDPQMVAENFVPPLLDAVLIDYQR

SEQ ID NO: 9462 - protein, 8 aa, Homo sapiens
MYTSCVEK

SEQ ID NO: 9463 - protein, 18 aa, Homo sapiens
NPQSILKPHSPTYNDEGL

SEQ ID NO: 9464 - protein, 12 aa, Homo sapiens
IIEAMGFTGPLK

SEQ ID NO: 9465 - protein, 9 aa, Homo sapiens
DSPQPVEEK

SEQ ID NO: 9466 - protein, 10 aa, Homo sapiens
VMGVNPYILK

SEQ ID NO: 9467 - protein, 9 aa, Homo sapiens
TDFEEFFLR

SEQ ID NO: 9468 - protein, 13 aa, Homo sapiens
KQSNPLLIHVDTK

SEQ ID NO: 9469 - protein, 16 aa, Homo sapiens
TFPLDVGSIVGYSGQK

SEQ ID NO: 9470 - protein, 15 aa, Homo sapiens
NILQLHDLTTGALLK

SEQ ID NO: 9471 - protein, 16 aa, Homo sapiens
QNCFDDFQCAAEYLIK

SEQ ID NO: 9472 - protein, 18 aa, Homo sapiens
LWYCDLQQESSGIAGILK

SEQ ID NO: 9473 - protein, 13 aa, Homo sapiens
VINIDFRDPEESK

SEQ ID NO: 9474 - protein, 17 aa, Homo sapiens
YTIGHAWTTDYGCSDSK

SEQ ID NO: 9475 - protein, 23 aa, Homo sapiens
MLSLQYPDVYRDETAVQDYHGHK

SEQ ID NO: 9476 - protein, 13 aa, Homo sapiens
SDGTETSTNLHQK

SEQ ID NO: 9477 - protein, 17 aa, Homo sapiens
ICDPYAWLEDPDSEQTK

SEQ ID NO: 9478 - protein, 8 aa, Homo sapiens
YSPLHNVK

SEQ ID NO: 9479 - protein, 8 aa, Homo sapiens
VVPLHSLK

SEQ ID NO: 9480 - protein, 18 aa, Homo sapiens
VLVPEHEKDVLEWIACVR

SEQ ID NO: 9481 - protein, 11 aa, Homo sapiens
FSCMAWTHDGK

SEQ ID NO: 9482 - protein, 13 aa, Homo sapiens
SNFLVLCYLHDVK

SEQ ID NO: 9483 - protein, 17 aa, Homo sapiens
GIDASDYQTVQIFYPSK

SEQ ID NO: 9484 - protein, 8 aa, Homo sapiens
IPMFIVHK

SEQ ID NO: 9485 - protein, 9 aa, Homo sapiens
MTELYDYPK

SEQ ID NO: 9486 - protein, 8 aa, Homo sapiens
EGCDPVNR

SEQ ID NO: 9487 - protein, 11 aa, Homo sapiens
FIATLQYIVGR

SEQ ID NO: 9488 - protein, 12 aa, Homo sapiens
HMGGILAVANIR

SEQ ID NO: 9489 - protein, 12 aa, Homo sapiens
ITVPFLEQCPIR

SEQ ID NO: 9490 - protein, 11 aa, Homo sapiens
MLSLQYPDVYR

SEQ ID NO: 9491 - protein, 17 aa, Homo sapiens
VFLDPNILSDDGTVALR

SEQ ID NO: 9492 - protein, 13 aa, Homo sapiens
VLYVQDSLEGEAR

SEQ ID NO: 9493 - protein, 15 aa, Homo sapiens
DLTPAVTDNDEADKK

SEQ ID NO: 9494 - protein, 20 aa, Homo sapiens
VHLSTGELGIIDSAFGQSGK

SEQ ID NO: 9495 - protein, 13 aa, Homo sapiens
ALSTTASTAAFDK

SEQ ID NO: 9496 - protein, 10 aa, Homo sapiens
AMDDYSVIGR

SEQ ID NO: 9497 - protein, 14 aa, Homo sapiens
LAFHGILLHGLEDR

SEQ ID NO: 9498 - protein, 9 aa, Homo sapiens
NYADSFLPR

SEQ ID NO: 9499 - protein, 8 aa, Homo sapiens
IPVTLNMK

SEQ ID NO: 9500 - protein, 25 aa, Homo sapiens
MVMPSWFDLMGLSPDAPEDEAGIKK

SEQ ID NO: 9501 - protein, 18 aa, Homo sapiens
TYPGVMHSSCPQEMAAVK

SEQ ID NO: 9502 - protein, 8 aa, Homo sapiens
FGALTAEK

SEQ ID NO: 9503 - protein, 8 aa, Homo sapiens
ALIEHEMK

SEQ ID NO: 9504 - protein, 18 aa, Homo sapiens
DLAILQCHGELDPMVPVR

SEQ ID NO: 9505 - protein, 26 aa, Homo sapiens
ETAAVIFLHGLGDTGHSWADALSTIR

SEQ ID NO: 9506 - protein, 8 aa, Homo sapiens
YICPHAPR

SEQ ID NO: 9507 - protein, 9 aa, Homo sapiens
AFLFDVVSK

SEQ ID NO: 9508 - protein, 7 aa, Homo sapiens
ILLMGLR

SEQ ID NO: 9509 - protein, 11 aa, Homo sapiens
DLTGELEYATK

SEQ ID NO: 9510 - protein, 21 aa, Homo sapiens
FVESDADEELLFNIPFTGNVK

SEQ ID NO: 9511 - protein, 17 aa, Homo sapiens
GIIIMGEDDDSHPSEMR

SEQ ID NO: 9512 - protein, 9 aa, Homo sapiens
GLAYGLYLR

SEQ ID NO: 9513 - protein, 18 aa, Homo sapiens
HEVTICNYEASANPADHR

SEQ ID NO: 9514 - protein, 8 aa, Homo sapiens
LQCLNESR

SEQ ID NO: 9515 - protein, 19 aa, Homo sapiens
RHEVTICNYEASANPADHR

SEQ ID NO: 9516 - protein, 7 aa, Homo sapiens
VFYIGLR

SEQ ID NO: 9517 - protein, 12 aa, Homo sapiens
VHQVTPQTHFIS

SEQ ID NO: 9518 - protein, 15 aa, Homo sapiens
KLPDVPNPLQILYIR

SEQ ID NO: 9519 - protein, 13 aa, Homo sapiens
YNLQMLEAEGSMK

SEQ ID NO: 9520 - protein, 23 aa, Homo sapiens
LPQGSLVPYMPNAVEQASEAVYK

SEQ ID NO: 9521 - protein, 17 aa, Homo sapiens
LGLGSYPDWGSNYYQVK

SEQ ID NO: 9522 - protein, 17 aa, Homo sapiens
SISPFPELEQFLQDTIK

SEQ ID NO: 9523 - protein, 15 aa, Homo sapiens
DCTALLHLFHAAVQR

SEQ ID NO: 9524 - protein, 7 aa, Homo sapiens
DIWDFLR

SEQ ID NO: 9525 - protein, 24 aa, Homo sapiens
ELYVAADEASIAPILAEAQAHFGR

SEQ ID NO: 9526 - protein, 13 aa, Homo sapiens
GHTQDTNTFFLCR

SEQ ID NO: 9527 - protein, 10 aa, Homo sapiens
INPLLDWTYR

SEQ ID NO: 9528 - protein, 14 aa, Homo sapiens
LHYGTDPCTGQPFR

SEQ ID NO: 9529 - protein, 9 aa, Homo sapiens
LSLVPSSAR

SEQ ID NO: 9530 - protein, 21 aa, Homo sapiens
VSVVPDEVATIAAEVTSFSNR

SEQ ID NO: 9531 - protein, 14 aa, Homo sapiens
DIENYIQDGKDDYK

SEQ ID NO: 9532 - protein, 12 aa, Homo sapiens
FQQEKEELINKK

SEQ ID NO: 9533 - protein, 16 aa, Homo sapiens
KLDQEMEQLNHHTTTR

SEQ ID NO: 9534 - protein, 14 aa, Homo sapiens
KLIQDQQEQIQHLK

SEQ ID NO: 9535 - protein, 15 aa, Homo sapiens
DIENYIQDGKDDYKK

SEQ ID NO: 9536 - protein, 10 aa, Homo sapiens
GYEEEIIHFK

SEQ ID NO: 9537 - protein, 8 aa, Homo sapiens
TQMEMLTK

SEQ ID NO: 9538 - protein, 23 aa, Homo sapiens
LKNDIEEQETLLGTIMPEEESAK

SEQ ID NO: 9539 - protein, 16 aa, Homo sapiens
HSDELTSLLGYFPNKK

SEQ ID NO: 9540 - protein, 13 aa, Homo sapiens
SDADENVSASDKR

SEQ ID NO: 9541 - protein, 9 aa, Homo sapiens
GNTFVHDPK

SEQ ID NO: 9542 - protein, 11 aa, Homo sapiens
EMGQMQVLQMK

SEQ ID NO: 9543 - protein, 10 aa, Homo sapiens
ILELDQELIK

SEQ ID NO: 9544 - protein, 13 aa, Homo sapiens
LIQDQQEQIQHLK

SEQ ID NO: 9545 - protein, 7 aa, Homo sapiens
DLDIYYK

SEQ ID NO: 9546 - protein, 11 aa, Homo sapiens
KEEQLSSYEDK

SEQ ID NO: 9547 - protein, 12 aa, Homo sapiens
SDADENVSASDK

SEQ ID NO: 9548 - protein, 10 aa, Homo sapiens
LEENIDNIKR

SEQ ID NO: 9549 - protein, 10 aa, Homo sapiens
MEVISLQNEK

SEQ ID NO: 9550 - protein, 18 aa, Homo sapiens
VFQTEAELQEVISDLQSK

SEQ ID NO: 9551 - protein, 10 aa, Homo sapiens
VIAQLSECEK

SEQ ID NO: 9552 - protein, 10 aa, Homo sapiens
NIDQCSEIVK

SEQ ID NO: 9553 - protein, 9 aa, Homo sapiens
QLEDWLHSK

SEQ ID NO: 9554 - protein, 10 aa, Homo sapiens
SYENELDPLK

SEQ ID NO: 9555 - protein, 12 aa, Homo sapiens
EQVSPLETTLEK

SEQ ID NO: 9556 - protein, 11 aa, Homo sapiens
FQQEKEELINK

SEQ ID NO: 9557 - protein, 9 aa, Homo sapiens
SFGIEDKDK

SEQ ID NO: 9558 - protein, 11 aa, Homo sapiens
CSVSSLGFNVH

SEQ ID NO: 9559 - protein, 15 aa, Homo sapiens
ENIESLAHALVEIIK

SEQ ID NO: 9560 - protein, 9 aa, Homo sapiens
FDEIFSATR

SEQ ID NO: 9561 - protein, 8 aa, Homo sapiens
GDTALDMR

SEQ ID NO: 9562 - protein, 16 aa, Homo sapiens
LFDVCGSQDFESDLDR

SEQ ID NO: 9563 - protein, 10 aa, Homo sapiens
LKEIEHNLSK

SEQ ID NO: 9564 - protein, 8 aa, Homo sapiens
LQGIDLDR

SEQ ID NO: 9565 - protein, 9 aa, Homo sapiens
LQISTNLQR

SEQ ID NO: 9566 - protein, 7 aa, Homo sapiens
MSILGVR

SEQ ID NO: 9567 - protein, 8 aa, Homo sapiens
NHNLALGR

SEQ ID NO: 9568 - protein, 7 aa, Homo sapiens
NIHGYMK

SEQ ID NO: 9569 - protein, 8 aa, Homo sapiens
NSNVETLK

SEQ ID NO: 9570 - protein, 19 aa, Homo sapiens
QQLEEQTVELSTEVQSLYR

SEQ ID NO: 9571 - protein, 12 aa, Homo sapiens
RRDEMLGLVPMR

SEQ ID NO: 9572 - protein, 8 aa, Homo sapiens
TLEGVITR

SEQ ID NO: 9573 - protein, 8 aa, Homo sapiens
VAQETDVR

SEQ ID NO: 9574 - protein, 9 aa, Homo sapiens
WLQDNLTLR

SEQ ID NO: 9575 - protein, 12 aa, Homo sapiens
YELQQLEGSSDR

SEQ ID NO: 9576 - protein, 11 aa, Homo sapiens
ADQPKPISPLK

SEQ ID NO: 9577 - protein, 9 aa, Homo sapiens
YTGTLDCAK

SEQ ID NO: 9578 - protein, 13 aa, Homo sapiens
CLLQIQASSGESK

SEQ ID NO: 9579 - protein, 17 aa, Homo sapiens
AFPANAACFLGFEVAMK

SEQ ID NO: 9580 - protein, 13 aa, Homo sapiens
ELIRDEGVTSLYK

SEQ ID NO: 9581 - protein, 9 aa, Homo sapiens
KLYQEFGIR

SEQ ID NO: 9582 - protein, 16 aa, Homo sapiens
DVPASGMYFMTYEWLK

SEQ ID NO: 9583 - protein, 8 aa, Homo sapiens
FQTAPPGK

SEQ ID NO: 9584 - protein, 8 aa, Homo sapiens
EGITGLYR

SEQ ID NO: 9585 - protein, 8 aa, Homo sapiens
GFNAVMIR

SEQ ID NO: 9586 - protein, 8 aa, Homo sapiens
GTVLTLMR

SEQ ID NO: 9587 - protein, 13 aa, Homo sapiens
GLVFDTLYGNLLK

SEQ ID NO: 9588 - protein, 12 aa, Homo sapiens
KPLFFGEGTVLR

SEQ ID NO: 9589 - protein, 17 aa, Homo sapiens
HLDSSSNERPDISSIQR

SEQ ID NO: 9590 - protein, 10 aa, Homo sapiens
QTLFASQVMR

SEQ ID NO: 9591 - protein, 10 aa, Homo sapiens
VGCAVQFCPK

SEQ ID NO: 9592 - protein, 24 aa, Homo sapiens
SEVKPTASDMLYMTWDPALAQIAK

SEQ ID NO: 9593 - protein, 16 aa, Homo sapiens
AGQPLQLLDASWYLPK

SEQ ID NO: 9594 - protein, 27 aa, Homo sapiens
DGIEPGHIPGTVNIPFTDFLSQEGLEK

SEQ ID NO: 9595 - protein, 9 aa, Homo sapiens
AQLDPAFIK

SEQ ID NO: 9596 - protein, 15 aa, Homo sapiens
AFGHHAVSLLDGGLR

SEQ ID NO: 9597 - protein, 13 aa, Homo sapiens
ALVSAQWVAEALR

SEQ ID NO: 9598 - protein, 11 aa, Homo sapiens
ARPEDVISEGR

SEQ ID NO: 9599 - protein, 16 aa, Homo sapiens
HIPGAAFFDIDQCSDR

SEQ ID NO: 9600 - protein, 12 aa, Homo sapiens
TYEDIKENLESR

SEQ ID NO: 9601 - protein, 19 aa, Homo sapiens
FINLQPSTLTDKWYGESQK

SEQ ID NO: 9602 - protein, 16 aa, Homo sapiens
SKDAAFQNVLTHVCLD

SEQ ID NO: 9603 - protein, 20 aa, Homo sapiens
HVDLLEVAQETDGFSGSDLK

SEQ ID NO: 9604 - protein, 9 aa, Homo sapiens
FHINQPALK

SEQ ID NO: 9605 - protein, 12 aa, Homo sapiens
SSSDHEATAMMK

SEQ ID NO: 9606 - protein, 12 aa, Homo sapiens
FINLQPSTLTDK

SEQ ID NO: 9607 - protein, 12 aa, Homo sapiens
GVLLYGPPGCGK

SEQ ID NO: 9608 - protein, 14 aa, Homo sapiens
DAAFQNVLTHVCLD

SEQ ID NO: 9609 - protein, 8 aa, Homo sapiens
DAALLCVR

SEQ ID NO: 9610 - protein, 26 aa, Homo sapiens
EYVNSTSEESHDEDEIRPVQQQDLHR

SEQ ID NO: 9611 - protein, 7 aa, Homo sapiens
HLFENSR

SEQ ID NO: 9612 - protein, 16 aa, Homo sapiens
LQPSIIFIDEIDSFLR

SEQ ID NO: 9613 - protein, 9 aa, Homo sapiens
NEVVGLIFR

SEQ ID NO: 9614 - protein, 10 aa, Homo sapiens
WMVDAIDPTR

SEQ ID NO: 9615 - protein, 16 aa, Homo sapiens
MALGLKCSRMVHPAFR

SEQ ID NO: 9616 - protein, 22 aa, Homo sapiens
GAAPYVQAFDSLLAGPVAEYLK

SEQ ID NO: 9617 - protein, 9 aa, Homo sapiens
EYWNEQSAK

SEQ ID NO: 9618 - protein, 10 aa, Homo sapiens
MENQAFDPEK

SEQ ID NO: 9619 - protein, 11 aa, Homo sapiens
TGTMLACYLVK

SEQ ID NO: 9620 - protein, 13 aa, Homo sapiens
LRPGSIETYEQEK

SEQ ID NO: 9621 - protein, 11 aa, Homo sapiens
FVQIVDEANAR

SEQ ID NO: 9622 - protein, 14 aa, Homo sapiens
GEAVGVHCALGFGR

SEQ ID NO: 9623 - protein, 12 aa, Homo sapiens
GLAAGDAIAEIR

SEQ ID NO: 9624 - protein, 14 aa, Homo sapiens
GVQPPNFSWVLPGR

SEQ ID NO: 9625 - protein, 8 aa, Homo sapiens
HLVSLTER

SEQ ID NO: 9626 - protein, 14 aa, Homo sapiens
IPDFCPPAPDQIDR

SEQ ID NO: 9627 - protein, 8 aa, Homo sapiens
LAGLALPR

SEQ ID NO: 9628 - protein, 14 aa, Homo sapiens
LPAHYQFLLDLGVR

SEQ ID NO: 9629 - protein, 12 aa, Homo sapiens
ESALILLQTVPK

SEQ ID NO: 9630 - protein, 7 aa, Homo sapiens
AGQLNMR

SEQ ID NO: 9631 - protein, 11 aa, Homo sapiens
EPDHMELEEDR

SEQ ID NO: 9632 - protein, 20 aa, Homo sapiens
NVEGVEEVHELHVWQLAGSR

SEQ ID NO: 9633 - protein, 22 aa, Homo sapiens
SHLMSLYSACSSEVPHGPVDQK

SEQ ID NO: 9634 - protein, 8 aa, Homo sapiens
IIDEVVNK

SEQ ID NO: 9635 - protein, 27 aa, Homo sapiens
EAATAVEQEKEILLEMIHSIQNSQDMR

SEQ ID NO: 9636 - protein, 9 aa, Homo sapiens
FLDDLGNAK

SEQ ID NO: 9637 - protein, 17 aa, Homo sapiens
EILLEMIHSIQNSQDMR

SEQ ID NO: 9638 - protein, 11 aa, Homo sapiens
LLESLDQLELR

SEQ ID NO: 9639 - protein, 16 aa, Homo sapiens
QISDGEREELNLTANR

SEQ ID NO: 9640 - protein, 7 aa, Homo sapiens
RLETLLR

SEQ ID NO: 9641 - protein, 9 aa, Homo sapiens
TLQQNAESR

SEQ ID NO: 9642 - protein, 19 aa, Homo sapiens
PSGFLGDPCLWDQAEQVLK

SEQ ID NO: 9643 - protein, 8 aa, Homo sapiens
TPTLFSTK

SEQ ID NO: 9644 - protein, 19 aa, Homo sapiens
EFGEPWDLNSGDGAFYGPK

SEQ ID NO: 9645 - protein, 16 aa, Homo sapiens
GPSTEYGFYHDFFLGK

SEQ ID NO: 9646 - protein, 18 aa, Homo sapiens
AAGLVSDLDADSGLTLSR

SEQ ID NO: 9647 - protein, 12 aa, Homo sapiens
AEASGGLGGLTR

SEQ ID NO: 9648 - protein, 8 aa, Homo sapiens
AVLGSVER

SEQ ID NO: 9649 - protein, 14 aa, Homo sapiens
GQAGALERPVLIHR

SEQ ID NO: 9650 - protein, 10 aa, Homo sapiens
ICQELTAAAR

SEQ ID NO: 9651 - protein, 15 aa, Homo sapiens
IDAVAWNTTPYQLAR

SEQ ID NO: 9652 - protein, 10 aa, Homo sapiens
LLSNSSSLWR

SEQ ID NO: 9653 - protein, 10 aa, Homo sapiens
SSGAPETLQR

SEQ ID NO: 9654 - protein, 13 aa, Homo sapiens
VSGISFPTTELLR

SEQ ID NO: 9655 - protein, 10 aa, Homo sapiens
VYNALVAFIR

SEQ ID NO: 9656 - protein, 13 aa, Homo sapiens
ECMTVAEISQFLK

SEQ ID NO: 9657 - protein, 11 aa, Homo sapiens
VIIVGLDNAGK

SEQ ID NO: 9658 - protein, 8 aa, Homo sapiens
LFNHQEHK

SEQ ID NO: 9659 - protein, 9 aa, Homo sapiens
AGLLIFANK

SEQ ID NO: 9660 - protein, 8 aa, Homo sapiens
MLAHEDLR

SEQ ID NO: 9661 - protein, 26 aa, Homo sapiens
ALEMAIEAGAEDVKETEDEEERNVFK

SEQ ID NO: 9662 - protein, 11 aa, Homo sapiens
SKDTYLLYEGR

SEQ ID NO: 9663 - protein, 18 aa, Homo sapiens
GPGGSSLLIEALSNSSHK

SEQ ID NO: 9664 - protein, 12 aa, Homo sapiens
FICDASSLHQVR

SEQ ID NO: 9665 - protein, 9 aa, Homo sapiens
GCEVIQEIK

SEQ ID NO: 9666 - protein, 9 aa, Homo sapiens
EHLLTNHLK

SEQ ID NO: 9667 - protein, 16 aa, Homo sapiens
LSHLKPSSEGLAIVTK

SEQ ID NO: 9668 - protein, 8 aa, Homo sapiens
ALDAAFYK

SEQ ID NO: 9669 - protein, 14 aa, Homo sapiens
FLCFGSEGGTYYIK

SEQ ID NO: 9670 - protein, 8 aa, Homo sapiens
ALSVETEK

SEQ ID NO: 9671 - protein, 14 aa, Homo sapiens
MEESVNQMQPLNEK

SEQ ID NO: 9672 - protein, 20 aa, Homo sapiens
MTANSVLEPGNSEVSLVCEK

SEQ ID NO: 9673 - protein, 12 aa, Homo sapiens
IPTHLFTFIQFK

SEQ ID NO: 9674 - protein, 9 aa, Homo sapiens
WRPDEEILK

SEQ ID NO: 9675 - protein, 7 aa, Homo sapiens
EVHELYK

SEQ ID NO: 9676 - protein, 13 aa, Homo sapiens
ALLQEMPLTALLR

SEQ ID NO: 9677 - protein, 13 aa, Homo sapiens
DELEVIHLIEEHR

SEQ ID NO: 9678 - protein, 17 aa, Homo sapiens
GMLDMCGFDTGALDVIR

SEQ ID NO: 9679 - protein, 11 aa, Homo sapiens
LGLENAEALIR

SEQ ID NO: 9680 - protein, 18 aa, Homo sapiens
QIANSQDGYVWQVTDMNR

SEQ ID NO: 9681 - protein, 15 aa, Homo sapiens
TRDELEVIHLIEEHR

SEQ ID NO: 9682 - protein, 7 aa, Homo sapiens
LAAPLLK

SEQ ID NO: 9683 - protein, 24 aa, Homo sapiens
GIPVMGHSEGICHMYVDSEASVDK

SEQ ID NO: 9684 - protein, 13 aa, Homo sapiens
FASYLTFSPSEVK

SEQ ID NO: 9685 - protein, 16 aa, Homo sapiens
ILHLLTQEALSIHGVK

SEQ ID NO: 9686 - protein, 24 aa, Homo sapiens
KVGTFFSEVKPAGPTVEQQGEMAR

SEQ ID NO: 9687 - protein, 12 aa, Homo sapiens
GPVGLEGLLTTK

SEQ ID NO: 9688 - protein, 23 aa, Homo sapiens
VGTFFSEVKPAGPTVEQQGEMAR

SEQ ID NO: 9689 - protein, 13 aa, Homo sapiens
VSGHVITDIVEGK

SEQ ID NO: 9690 - protein, 11 aa, Homo sapiens
QALHSGQNQLK

SEQ ID NO: 9691 - protein, 18 aa, Homo sapiens
LIDIFYPGDQQSVTFGTK

SEQ ID NO: 9692 - protein, 17 aa, Homo sapiens
CEYPAACNALETLLIHR

SEQ ID NO: 9693 - protein, 8 aa, Homo sapiens
DLEEAEGR

SEQ ID NO: 9694 - protein, 10 aa, Homo sapiens
EMAIPVLEAR

SEQ ID NO: 9695 - protein, 10 aa, Homo sapiens
GDECGLALGR

SEQ ID NO: 9696 - protein, 16 aa, Homo sapiens
LASIVEQVSVLQNQGR

SEQ ID NO: 9697 - protein, 9 aa, Homo sapiens
LNSLAIGLR

SEQ ID NO: 9698 - protein, 8 aa, Homo sapiens
MIDLIIPR

SEQ ID NO: 9699 - protein, 10 aa, Homo sapiens
MLATLEPEQR

SEQ ID NO: 9700 - protein, 12 aa, Homo sapiens
QIAASSQDSVGR

SEQ ID NO: 9701 - protein, 14 aa, Homo sapiens
SWSNIPFITVPLSR

SEQ ID NO: 9702 - protein, 12 aa, Homo sapiens
TPLFDQIIDMLR

SEQ ID NO: 9703 - protein, 11 aa, Homo sapiens
YLHENLPIPQR

SEQ ID NO: 9704 - protein, 23 aa, Homo sapiens
LIKEPAPDSGLLGLFQGQNSLLH

SEQ ID NO: 9705 - protein, 16 aa, Homo sapiens
VLPGSSVLFLCDMQEK

SEQ ID NO: 9706 - protein, 20 aa, Homo sapiens
EPAPDSGLLGLFQGQNSLLH

SEQ ID NO: 9707 - protein, 15 aa, Homo sapiens
HNIAYFPQIVSVAAR

SEQ ID NO: 9708 - protein, 23 aa, Homo sapiens
SVLLCGIEAQACILNTTLDLLDR

SEQ ID NO: 9709 - protein, 21 aa, Homo sapiens
FVQLINTVLNGDQHFMSALDK

SEQ ID NO: 9710 - protein, 7 aa, Homo sapiens
APELLAK

SEQ ID NO: 9711 - protein, 11 aa, Homo sapiens
ELQDSTQMNEK

SEQ ID NO: 9712 - protein, 7 aa, Homo sapiens
YWEEYSK

SEQ ID NO: 9713 - protein, 13 aa, Homo sapiens
KLMVEPLQAILIR

SEQ ID NO: 9714 - protein, 12 aa, Homo sapiens
ALTSVVNYREPK

SEQ ID NO: 9715 - protein, 24 aa, Homo sapiens
ATSNLTQENMPTLFVESVLEVHGK

SEQ ID NO: 9716 - protein, 12 aa, Homo sapiens
KNDMANMYVLLR

SEQ ID NO: 9717 - protein, 18 aa, Homo sapiens
QEASNLLQESNCSQYMEK

SEQ ID NO: 9718 - protein, 8 aa, Homo sapiens
YLNTQFIK

SEQ ID NO: 9719 - protein, 9 aa, Homo sapiens
LTSFITVFK

SEQ ID NO: 9720 - protein, 19 aa, Homo sapiens
FYQEIFESPFLTETGEYYK

SEQ ID NO: 9721 - protein, 10 aa, Homo sapiens
QACGYEFTSK

SEQ ID NO: 9722 - protein, 10 aa, Homo sapiens
YIDDKDVFQK

SEQ ID NO: 9723 - protein, 16 aa, Homo sapiens
VIHGVINSFVHVEQYK

SEQ ID NO: 9724 - protein, 10 aa, Homo sapiens
DTPQEMEQTR

SEQ ID NO: 9725 - protein, 18 aa, Homo sapiens
FSDIYALCVAYPEPLGER

SEQ ID NO: 9726 - protein, 10 aa, Homo sapiens
GMTENEVEDR

SEQ ID NO: 9727 - protein, 13 aa, Homo sapiens
HNALIQEVISQSR

SEQ ID NO: 9728 - protein, 8 aa, Homo sapiens
IFLENHVR

SEQ ID NO: 9729 - protein, 12 aa, Homo sapiens
LMVEPLQAILIR

SEQ ID NO: 9730 - protein, 18 aa, Homo sapiens
MVADHLQFLHAECHNIIR

SEQ ID NO: 9731 - protein, 14 aa, Homo sapiens
VLESEEQVLVMYHR

SEQ ID NO: 9732 - protein, 7 aa, Homo sapiens
YCDNLLK

SEQ ID NO: 9733 - protein, 7 aa, Homo sapiens
FIHGLIK

SEQ ID NO: 9734 - protein, 14 aa, Homo sapiens
QFSENIYEAFLVGK

SEQ ID NO: 9735 - protein, 10 aa, Homo sapiens
SVEVEGYGSK

SEQ ID NO: 9736 - protein, 21 aa, Homo sapiens
KIETFLNHYPVESSWIAPELR

SEQ ID NO: 9737 - protein, 9 aa, Homo sapiens
VPGFMYPVK

SEQ ID NO: 9738 - protein, 8 aa, Homo sapiens
TAVEFLSK

SEQ ID NO: 9739 - protein, 24 aa, Homo sapiens
DSGPLSDPITGKPYVPLLEAEEVR

SEQ ID NO: 9740 - protein, 17 aa, Homo sapiens
GEPGGILCFLPGWQEIK

SEQ ID NO: 9741 - protein, 11 aa, Homo sapiens
LQSDDILPLGK

SEQ ID NO: 9742 - protein, 11 aa, Homo sapiens
QAAAAACQLFK

SEQ ID NO: 9743 - protein, 16 aa, Homo sapiens
YLILPVHSNIPMMDQK

SEQ ID NO: 9744 - protein, 11 aa, Homo sapiens
AIFQQPPVGVR

SEQ ID NO: 9745 - protein, 16 aa, Homo sapiens
ALLSHDSGSDHLAFVR

SEQ ID NO: 9746 - protein, 10 aa, Homo sapiens
AVAGWEEVLR

SEQ ID NO: 9747 - protein, 18 aa, Homo sapiens
AVDEAVILLQEIGVLDQR

SEQ ID NO: 9748 - protein, 9 aa, Homo sapiens
CNVIITQPR

SEQ ID NO: 9749 - protein, 26 aa, Homo sapiens
EAAEAESGMAPGGPGEGDGSLVNASR

SEQ ID NO: 9750 - protein, 15 aa, Homo sapiens
ENYLEENLLYAPSLR

SEQ ID NO: 9751 - protein, 9 aa, Homo sapiens
EYLTTLGQR

SEQ ID NO: 9752 - protein, 9 aa, Homo sapiens
GPCGSFDVR

SEQ ID NO: 9753 - protein, 8 aa, Homo sapiens
GWGLLGPR

SEQ ID NO: 9754 - protein, 8 aa, Homo sapiens
IPQLLLER

SEQ ID NO: 9755 - protein, 9 aa, Homo sapiens
ISAVSVAQR

SEQ ID NO: 9756 - protein, 10 aa, Homo sapiens
LSQSLLELWR

SEQ ID NO: 9757 - protein, 9 aa, Homo sapiens
NLLNSVIGR

SEQ ID NO: 9758 - protein, 16 aa, Homo sapiens
NNEPLTHAMYNLASLR

SEQ ID NO: 9759 - protein, 17 aa, Homo sapiens
RGPVWQEAPQLPVDPHR

SEQ ID NO: 9760 - protein, 10 aa, Homo sapiens
RISAVSVAQR

SEQ ID NO: 9761 - protein, 13 aa, Homo sapiens
RPCTIQVPEPILR

SEQ ID NO: 9762 - protein, 11 aa, Homo sapiens
VSCLETVWVSR

SEQ ID NO: 9763 - protein, 12 aa, Homo sapiens
WDSEVMASTVVK

SEQ ID NO: 9764 - protein, 17 aa, Homo sapiens
KYQLNLPPYPDTECVYR

SEQ ID NO: 9765 - protein, 16 aa, Homo sapiens
RPNKPLFTALVTQCQK

SEQ ID NO: 9766 - protein, 8 aa, Homo sapiens
FVPPALEK

SEQ ID NO: 9767 - protein, 12 aa, Homo sapiens
LFGYEPTIYYPK

SEQ ID NO: 9768 - protein, 18 aa, Homo sapiens
GNAGGIQPDLLISLTAPK

SEQ ID NO: 9769 - protein, 11 aa, Homo sapiens
EPFHSILSVLK

SEQ ID NO: 9770 - protein, 19 aa, Homo sapiens
GLTVPIASIDIPSGWDVEK

SEQ ID NO: 9771 - protein, 15 aa, Homo sapiens
GDVREPFHSILSVLK

SEQ ID NO: 9772 - protein, 9 aa, Homo sapiens
KSATQFTGR

SEQ ID NO: 9773 - protein, 8 aa, Homo sapiens
SATQFTGR

SEQ ID NO: 9774 - protein, 23 aa, Homo sapiens
SPPTVLVICGPGNNGGDGLVCAR

SEQ ID NO: 9775 - protein, 16 aa, Homo sapiens
YQLNLPPYPDTECVYR

SEQ ID NO: 9776 - protein, 13 aa, Homo sapiens
DFLAGGVAAAVSK

SEQ ID NO: 9777 - protein, 9 aa, Homo sapiens
GDHAWSFLK

SEQ ID NO: 9778 - protein, 11 aa, Homo sapiens
EFHGLGDCIIK

SEQ ID NO: 9779 - protein, 9 aa, Homo sapiens
EQGFLSFWR

SEQ ID NO: 9780 - protein, 9 aa, Homo sapiens
QLFLGGVDR

SEQ ID NO: 9781 - protein, 12 aa, Homo sapiens
TPLGGIHISQTK

SEQ ID NO: 9782 - protein, 11 aa, Homo sapiens
EGSVMGVTVSR

SEQ ID NO: 9783 - protein, 13 aa, Homo sapiens
LSFGDAAQTLWAR

SEQ ID NO: 9784 - protein, 22 aa, Homo sapiens
NTFEVIPVNSAGSPVGDVPFIR

SEQ ID NO: 9785 - protein, 18 aa, Homo sapiens
YGLVFAGGASGLQIFPTK

SEQ ID NO: 9786 - protein, 19 aa, Homo sapiens
VCATLPSTVAVTSVCWSPK

SEQ ID NO: 9787 - protein, 15 aa, Homo sapiens
SAQGSSSPVPSMVQK

SEQ ID NO: 9788 - protein, 12 aa, Homo sapiens
ACFQVGTSEEMK

SEQ ID NO: 9789 - protein, 17 aa, Homo sapiens
TPSIQPSLLPHAAPFAK

SEQ ID NO: 9790 - protein, 18 aa, Homo sapiens
DSDPVMAGIGEEIAHFQK

SEQ ID NO: 9791 - protein, 9 aa, Homo sapiens
SSLLAVSNK

SEQ ID NO: 9792 - protein, 21 aa, Homo sapiens
FAVQDVNDVLDLEWDQHLEQK

SEQ ID NO: 9793 - protein, 10 aa, Homo sapiens
DAGGMVIDMK

SEQ ID NO: 9794 - protein, 14 aa, Homo sapiens
NLLIQNKPGDDPNK

SEQ ID NO: 9795 - protein, 9 aa, Homo sapiens
VQGLLVPMK

SEQ ID NO: 9796 - protein, 14 aa, Homo sapiens
ETTESLHGDISSLK

SEQ ID NO: 9797 - protein, 17 aa, Homo sapiens
SPGSTPTTPTSSQAPQK

SEQ ID NO: 9798 - protein, 10 aa, Homo sapiens
DSGYLHLLYK

SEQ ID NO: 9799 - protein, 22 aa, Homo sapiens
SHLVHGSSPGVMGTSVATSASK

SEQ ID NO: 9800 - protein, 14 aa, Homo sapiens
TESDDLHTFLLEIK

SEQ ID NO: 9801 - protein, 17 aa, Homo sapiens
AAPGPGPSTFSFVPPSK

SEQ ID NO: 9802 - protein, 15 aa, Homo sapiens
TPHPVLTPVAANQAK

SEQ ID NO: 9803 - protein, 18 aa, Homo sapiens
TSGVPSGFNFTAPPVLGK

SEQ ID NO: 9804 - protein, 12 aa, Homo sapiens
NVPQVVNVQELK

SEQ ID NO: 9805 - protein, 18 aa, Homo sapiens
QMASQAPAVNTLTESTLK

SEQ ID NO: 9806 - protein, 15 aa, Homo sapiens
PVAPSGTALSTTSSK

SEQ ID NO: 9807 - protein, 7 aa, Homo sapiens
EIINQQR

SEQ ID NO: 9808 - protein, 11 aa, Homo sapiens
ETLFNTLANNR

SEQ ID NO: 9809 - protein, 22 aa, Homo sapiens
HGAPSPSHPISAPQAAAAAALR

SEQ ID NO: 9810 - protein, 10 aa, Homo sapiens
IFDSPEELPK

SEQ ID NO: 9811 - protein, 22 aa, Homo sapiens
LGELLFPSSLAGETLGSFSGLR

SEQ ID NO: 9812 - protein, 12 aa, Homo sapiens
LNHLVDSLQQLR

SEQ ID NO: 9813 - protein, 7 aa, Homo sapiens
LSLEGER

SEQ ID NO: 9814 - protein, 17 aa, Homo sapiens
QSDQINWESWLLEDSSR

SEQ ID NO: 9815 - protein, 14 aa, Homo sapiens
TTLLEGFAGVEEAR

SEQ ID NO: 9816 - protein, 9 aa, Homo sapiens
TCAEQIVAK

SEQ ID NO: 9817 - protein, 17 aa, Homo sapiens
HLSTPSSVSPEPQDSAK

SEQ ID NO: 9818 - protein, 19 aa, Homo sapiens
TASQGPQTDSVIQNSENIK

SEQ ID NO: 9819 - protein, 13 aa, Homo sapiens
SMGLTLAESELTK

SEQ ID NO: 9820 - protein, 21 aa, Homo sapiens
EVGEDYQIAIPDSHLPVSEER

SEQ ID NO: 9821 - protein, 19 aa, Homo sapiens
SETIQDTDTQSLVGSPSTR

SEQ ID NO: 9822 - protein, 13 aa, Homo sapiens
TGTGDIATCYSPR

SEQ ID NO: 9823 - protein, 9 aa, Homo sapiens
VLDQVFYQR

SEQ ID NO: 9824 - protein, 8 aa, Homo sapiens
YTEWPTER

SEQ ID NO: 9825 - protein, 19 aa, Homo sapiens
ALALNCFAPINDQEGAEAK

SEQ ID NO: 9826 - protein, 9 aa, Homo sapiens
IIFVDEVFK

SEQ ID NO: 9827 - protein, 10 aa, Homo sapiens
LWNEVLASLK

SEQ ID NO: 9828 - protein, 15 aa, Homo sapiens
DRPASGSPFQLFLSK

SEQ ID NO: 9829 - protein, 23 aa, Homo sapiens
ECTIVPSNHYGPIPGIPVGTMWR

SEQ ID NO: 9830 - protein, 16 aa, Homo sapiens
IERPGEGSPMVDNPMR

SEQ ID NO: 9831 - protein, 13 aa, Homo sapiens
IQELFHVEPGLQR

SEQ ID NO: 9832 - protein, 18 aa, Homo sapiens
LGLTMQYPEGYLEALANR

SEQ ID NO: 9833 - protein, 10 aa, Homo sapiens
LNDTIQLLVR

SEQ ID NO: 9834 - protein, 7 aa, Homo sapiens
SGFLVWR

SEQ ID NO: 9835 - protein, 15 aa, Homo sapiens
VEPYSLTAQQSSLIR

SEQ ID NO: 9836 - protein, 10 aa, Homo sapiens
ELEEYLEKEK

SEQ ID NO: 9837 - protein, 20 aa, Homo sapiens
HNTEDFTLFTLDDVDAAFDK

SEQ ID NO: 9838 - protein, 15 aa, Homo sapiens
LGLNCAIYATIPVYK

SEQ ID NO: 9839 - protein, 14 aa, Homo sapiens
GDGNVLIAVDTAGR

SEQ ID NO: 9840 - protein, 13 aa, Homo sapiens
MGQMFMYDLYQSR

SEQ ID NO: 9841 - protein, 7 aa, Homo sapiens
NNPFQFR

SEQ ID NO: 9842 - protein, 9 aa, Homo sapiens
VTYIDYEGR

SEQ ID NO: 9843 - protein, 15 aa, Homo sapiens
VVLASQPDLECGFSR

SEQ ID NO: 9844 - protein, 14 aa, Homo sapiens
VKNPEDLSAETMAK

SEQ ID NO: 9845 - protein, 13 aa, Homo sapiens
GLSNLFLSCPIPK

SEQ ID NO: 9846 - protein, 18 aa, Homo sapiens
LPSRPPLPGSGGSQSGAK

SEQ ID NO: 9847 - protein, 11 aa, Homo sapiens
SLENAIEWSVK

SEQ ID NO: 9848 - protein, 9 aa, Homo sapiens
LPFLVMIIK

SEQ ID NO: 9849 - protein, 12 aa, Homo sapiens
YFTFEVQVLDDK

SEQ ID NO: 9850 - protein, 11 aa, Homo sapiens
VKPFICTMPMR

SEQ ID NO: 9851 - protein, 12 aa, Homo sapiens
LYSEDELPAEFK

SEQ ID NO: 9852 - protein, 8 aa, Homo sapiens
LYLPVQNK

SEQ ID NO: 9853 - protein, 11 aa, Homo sapiens
AYGTNYIETLR

SEQ ID NO: 9854 - protein, 17 aa, Homo sapiens
LDDGWNQIQFNLLDFTR

SEQ ID NO: 9855 - protein, 17 aa, Homo sapiens
NTFQSGFLSILYSIGSK

SEQ ID NO: 9856 - protein, 12 aa, Homo sapiens
RAYGTNYIETLR

SEQ ID NO: 9857 - protein, 8 aa, Homo sapiens
VQIHANCR

SEQ ID NO: 9858 - protein, 12 aa, Homo sapiens
SPALQILLTNTK

SEQ ID NO: 9859 - protein, 12 aa, Homo sapiens
VIEGDVVSALNK

SEQ ID NO: 9860 - protein, 10 aa, Homo sapiens
MGVPICGACR

SEQ ID NO: 9861 - protein, 24 aa, Homo sapiens
MLGVAAGMTHSNMANALASATCER

SEQ ID NO: 9862 - protein, 28 aa, Homo sapiens
EAFNMIDQNRDGFIDKEDLHDMLASLGK

SEQ ID NO: 9863 - protein, 18 aa, Homo sapiens
DGFIDKEDLHDMLASLGK

SEQ ID NO: 9864 - protein, 18 aa, Homo sapiens
ATSNVFAMFDQSQIQEFK

SEQ ID NO: 9865 - protein, 11 aa, Homo sapiens
KGNFNYIEFTR

SEQ ID NO: 9866 - protein, 10 aa, Homo sapiens
EAFNMIDQNR

SEQ ID NO: 9867 - protein, 9 aa, Homo sapiens
ELLTTMGDR

SEQ ID NO: 9868 - protein, 20 aa, Homo sapiens
ELLTTMGDRFTDEEVDELYR

SEQ ID NO: 9869 - protein, 11 aa, Homo sapiens
FTDEEVDELYR

SEQ ID NO: 9870 - protein, 10 aa, Homo sapiens
GNFNYIEFTR

SEQ ID NO: 9871 - protein, 11 aa, Homo sapiens
LNGTDPEDVIR

SEQ ID NO: 9872 - protein, 20 aa, Homo sapiens
NAFACFDEEATGTIQEDYLR

SEQ ID NO: 9873 - protein, 8 aa, Homo sapiens
LFDFVNAK

SEQ ID NO: 9874 - protein, 14 aa, Homo sapiens
AETLEFNDVYQEVK

SEQ ID NO: 9875 - protein, 7 aa, Homo sapiens
KAGEIWK

SEQ ID NO: 9876 - protein, 21 aa, Homo sapiens
ITVPGNFQGHSGAQCITCSYK

SEQ ID NO: 9877 - protein, 22 aa, Homo sapiens
KITVPGNFQGHSGAQCITCSYK

SEQ ID NO: 9878 - protein, 24 aa, Homo sapiens
FYVPPTQEDGVDPVEAFAQNVLSK

SEQ ID NO: 9879 - protein, 11 aa, Homo sapiens
IYPTFLHLHGK

SEQ ID NO: 9880 - protein, 15 aa, Homo sapiens
IKSDHPGISITDLSK

SEQ ID NO: 9881 - protein, 13 aa, Homo sapiens
SDHPGISITDLSK

SEQ ID NO: 9882 - protein, 7 aa, Homo sapiens
LFLLPHK

SEQ ID NO: 9883 - protein, 13 aa, Homo sapiens
GFIYVHKPPVHIR

SEQ ID NO: 9884 - protein, 8 aa, Homo sapiens
GWNWGTVK

SEQ ID NO: 9885 - protein, 9 aa, Homo sapiens
SFDFEIETK

SEQ ID NO: 9886 - protein, 8 aa, Homo sapiens
VALGHGLK

SEQ ID NO: 9887 - protein, 15 aa, Homo sapiens
ADVIQATGDAICIFR

SEQ ID NO: 9888 - protein, 11 aa, Homo sapiens
ASSGLLYPLER

SEQ ID NO: 9889 - protein, 8 aa, Homo sapiens
ELQCLTPR

SEQ ID NO: 9890 - protein, 11 aa, Homo sapiens
FDEISFVNFAR

SEQ ID NO: 9891 - protein, 8 aa, Homo sapiens
IPYTTVLR

SEQ ID NO: 9892 - protein, 12 aa, Homo sapiens
NMSGSLYEMVSR

SEQ ID NO: 9893 - protein, 12 aa, Homo sapiens
QGTQYTFSSIER

SEQ ID NO: 9894 - protein, 14 aa, Homo sapiens
RPMSAYMLWLNASR

SEQ ID NO: 9895 - protein, 15 aa, Homo sapiens
VDNIQAGELTEGIWR

SEQ ID NO: 9896 - protein, 16 aa, Homo sapiens
YKLDEDEDEDDADLSK

SEQ ID NO: 9897 - protein, 11 aa, Homo sapiens
RSECNMCNTPK

SEQ ID NO: 9898 - protein, 9 aa, Homo sapiens
TCSNVNWAR

SEQ ID NO: 9899 - protein, 10 aa, Homo sapiens
TGYGGGFNER

SEQ ID NO: 9900 - protein, 13 aa, Homo sapiens
EMQQSEAQINTAK

SEQ ID NO: 9901 - protein, 11 aa, Homo sapiens
MLDEYFEEQMK

SEQ ID NO: 9902 - protein, 9 aa, Homo sapiens
ILPQDVILK

SEQ ID NO: 9903 - protein, 11 aa, Homo sapiens
SVSLVGEDERK

SEQ ID NO: 9904 - protein, 12 aa, Homo sapiens
TVINFTMPNTIK

SEQ ID NO: 9905 - protein, 13 aa, Homo sapiens
SADFNPDFVFTEK

SEQ ID NO: 9906 - protein, 13 aa, Homo sapiens
KSVFDEELTNTSK

SEQ ID NO: 9907 - protein, 18 aa, Homo sapiens
EGTYDGSWALADVMSQLK

SEQ ID NO: 9908 - protein, 12 aa, Homo sapiens
AAPDILIATPGR

SEQ ID NO: 9909 - protein, 8 aa, Homo sapiens
AGPSFEER

SEQ ID NO: 9910 - protein, 7 aa, Homo sapiens
AQMFAER

SEQ ID NO: 9911 - protein, 10 aa, Homo sapiens
EAIVAALLTR

SEQ ID NO: 9912 - protein, 14 aa, Homo sapiens
EGDREAIVAALLTR

SEQ ID NO: 9913 - protein, 11 aa, Homo sapiens
ELGIQVHSVTR

SEQ ID NO: 9914 - protein, 8 aa, Homo sapiens
VLVLVPTR

SEQ ID NO: 9915 - protein, 7 aa, Homo sapiens
KQGEVSK

SEQ ID NO: 9916 - protein, 14 aa, Homo sapiens
FVIHCNSPVWGADK

SEQ ID NO: 9917 - protein, 7 aa, Homo sapiens
SLFLGQK

SEQ ID NO: 9918 - protein, 9 aa, Homo sapiens
QTAAQLILK

SEQ ID NO: 9919 - protein, 20 aa, Homo sapiens
NGPLEVAGAAVSAGHGLPAK

SEQ ID NO: 9920 - protein, 7 aa, Homo sapiens
CEELLEK

SEQ ID NO: 9921 - protein, 10 aa, Homo sapiens
NCLALADDKK

SEQ ID NO: 9922 - protein, 21 aa, Homo sapiens
FVIHCNSPVWGADKCEELLEK

SEQ ID NO: 9923 - protein, 9 aa, Homo sapiens
DDLGNTLEK

SEQ ID NO: 9924 - protein, 15 aa, Homo sapiens
AISSYFVSTMSSSIK

SEQ ID NO: 9925 - protein, 13 aa, Homo sapiens
GKLEAIITPPPAK

SEQ ID NO: 9926 - protein, 17 aa, Homo sapiens
HILLAVANDEELNQLLK

SEQ ID NO: 9927 - protein, 11 aa, Homo sapiens
LEAIITPPPAK

SEQ ID NO: 9928 - protein, 20 aa, Homo sapiens
GVTIASGGVLPNIHPELLAK

SEQ ID NO: 9929 - protein, 22 aa, Homo sapiens
AASADSTTEGTPADGFTVLSTK

SEQ ID NO: 9930 - protein, 9 aa, Homo sapiens
AGVIFPVGR

SEQ ID NO: 9931 - protein, 10 aa, Homo sapiens
EFVEAVLELR

SEQ ID NO: 9932 - protein, 11 aa, Homo sapiens
SIAFPSIGSGR

SEQ ID NO: 9933 - protein, 12 aa, Homo sapiens
WLTIQSGEQPYK

SEQ ID NO: 9934 - protein, 7 aa, Homo sapiens
FGLNIDR

SEQ ID NO: 9935 - protein, 12 aa, Homo sapiens
IEYDDFVECLLR

SEQ ID NO: 9936 - protein, 11 aa, Homo sapiens
AVVEGQLQVAK

SEQ ID NO: 9937 - protein, 13 aa, Homo sapiens
TTPATELDAWLAK

SEQ ID NO: 9938 - protein, 10 aa, Homo sapiens
WLMHLAPGFK

SEQ ID NO: 9939 - protein, 12 aa, Homo sapiens
QLAITHHVLSGK

SEQ ID NO: 9940 - protein, 8 aa, Homo sapiens
FQLGGSAR

SEQ ID NO: 9941 - protein, 10 aa, Homo sapiens
LDHAWAGIAR

SEQ ID NO: 9942 - protein, 16 aa, Homo sapiens
MEPGEELEEEGSPGGR

SEQ ID NO: 9943 - protein, 8 aa, Homo sapiens
PITPGTLR

SEQ ID NO: 9944 - protein, 13 aa, Homo sapiens
QVICVYTDDFTDR

SEQ ID NO: 9945 - protein, 10 aa, Homo sapiens
VEVEEDGQLK

SEQ ID NO: 9946 - protein, 13 aa, Homo sapiens
QVAEAYEVLSDAK

SEQ ID NO: 9947 - protein, 15 aa, Homo sapiens
APGPWDPLASAAGLK

SEQ ID NO: 9948 - protein, 11 aa, Homo sapiens
VDYYEVLGVQR

SEQ ID NO: 9949 - protein, 7 aa, Homo sapiens
KELTQIK

SEQ ID NO: 9950 - protein, 11 aa, Homo sapiens
LKGDDLQAIKK

SEQ ID NO: 9951 - protein, 9 aa, Homo sapiens
GDDLQAIKK

SEQ ID NO: 9952 - protein, 7 aa, Homo sapiens
KDETNVK

SEQ ID NO: 9953 - protein, 16 aa, Homo sapiens
MIAGQVLDINLAAEPK

SEQ ID NO: 9954 - protein, 12 aa, Homo sapiens
VFIGNLNTLVVK

SEQ ID NO: 9955 - protein, 10 aa, Homo sapiens
LKGDDLQAIK

SEQ ID NO: 9956 - protein, 10 aa, Homo sapiens
KSDVEAIFSK

SEQ ID NO: 9957 - protein, 9 aa, Homo sapiens
SDVEAIFSK

SEQ ID NO: 9958 - protein, 8 aa, Homo sapiens
IVGCSVHK

SEQ ID NO: 9959 - protein, 10 aa, Homo sapiens
VDSLLENLEK

SEQ ID NO: 9960 - protein, 12 aa, Homo sapiens
QKVDSLLENLEK

SEQ ID NO: 9961 - protein, 7 aa, Homo sapiens
ASNVTNK

SEQ ID NO: 9962 - protein, 11 aa, Homo sapiens
GFAFVQYVNER

SEQ ID NO: 9963 - protein, 7 aa, Homo sapiens
MYSYPAR

SEQ ID NO: 9964 - protein, 14 aa, Homo sapiens
NDKSEEEQSSSSVK

SEQ ID NO: 9965 - protein, 18 aa, Homo sapiens
SAAEMYGSSFDLDYDFQR

SEQ ID NO: 9966 - protein, 9 aa, Homo sapiens
VPPPPPIAR

SEQ ID NO: 9967 - protein, 11 aa, Homo sapiens
VTKPNIPEAIR

SEQ ID NO: 9968 - protein, 7 aa, Homo sapiens
LLIAAQK

SEQ ID NO: 9969 - protein, 12 aa, Homo sapiens
SVQTTLQTDEVK

SEQ ID NO: 9970 - protein, 11 aa, Homo sapiens
IEEGHIGVYYR

SEQ ID NO: 9971 - protein, 12 aa, Homo sapiens
ISEIEDAAFLAR

SEQ ID NO: 9972 - protein, 20 aa, Homo sapiens
LALQQDLTSMAPGLVIQAVR

SEQ ID NO: 9973 - protein, 10 aa, Homo sapiens
KIDKYTEVLK

SEQ ID NO: 9974 - protein, 12 aa, Homo sapiens
VFDGIPPPYDKK

SEQ ID NO: 9975 - protein, 11 aa, Homo sapiens
YQAVTATLEEK

SEQ ID NO: 9976 - protein, 7 aa, Homo sapiens
KFAYLGR

SEQ ID NO: 9977 - protein, 8 aa, Homo sapiens
LAHEVGWK

SEQ ID NO: 9978 - protein, 8 aa, Homo sapiens
MVVPAALK

SEQ ID NO: 9979 - protein, 9 aa, Homo sapiens
IDKYTEVLK

SEQ ID NO: 9980 - protein, 11 aa, Homo sapiens
VFDGIPPPYDK

SEQ ID NO: 9981 - protein, 9 aa, Homo sapiens
RMVVPAALK

SEQ ID NO: 9982 - protein, 11 aa, Homo sapiens
AEVQVLVLDGR

SEQ ID NO: 9983 - protein, 12 aa, Homo sapiens
CEGINISGNFYR

SEQ ID NO: 9984 - protein, 7 aa, Homo sapiens
MNTNPSR

SEQ ID NO: 9985 - protein, 10 aa, Homo sapiens
DYENDEDVNK

SEQ ID NO: 9986 - protein, 13 aa, Homo sapiens
GALEMVQMAVEAK

SEQ ID NO: 9987 - protein, 15 aa, Homo sapiens
FVQDTLKGDGVTEIR

SEQ ID NO: 9988 - protein, 14 aa, Homo sapiens
DYENDEDVNKQLDK

SEQ ID NO: 9989 - protein, 8 aa, Homo sapiens
LIEDFLAR

SEQ ID NO: 9990 - protein, 11 aa, Homo sapiens
RIEDNLPAGEE

SEQ ID NO: 9991 - protein, 16 aa, Homo sapiens
KVDGSVNAYAINVSQK

SEQ ID NO: 9992 - protein, 12 aa, Homo sapiens
KGGFNRPLDFIA

SEQ ID NO: 9993 - protein, 15 aa, Homo sapiens
VDGSVNAYAINVSQK

SEQ ID NO: 9994 - protein, 11 aa, Homo sapiens
LMGFASFDSTK

SEQ ID NO: 9995 - protein, 17 aa, Homo sapiens
LQIGDFVSVSSPEGNFK

SEQ ID NO: 9996 - protein, 13 aa, Homo sapiens
ILNYALTDIPSLR

SEQ ID NO: 9997 - protein, 17 aa, Homo sapiens
MSSTFIGNSTAIQELFK

SEQ ID NO: 9998 - protein, 7 aa, Homo sapiens
KMILQQF

SEQ ID NO: 9999 - protein, 11 aa, Homo sapiens
DNNELLLFILK

SEQ ID NO: 10000 - protein, 16 aa, Homo sapiens
GVCLIDEFDKMNDQDR

SEQ ID NO: 10001 - protein, 16 aa, Homo sapiens
TSIHEAMEQQSISISK

SEQ ID NO: 10002 - protein, 7 aa, Homo sapiens
FSHDLKR

SEQ ID NO: 10003 - protein, 12 aa, Homo sapiens
THVDSHGHNVFK

SEQ ID NO: 10004 - protein, 22 aa, Homo sapiens
ATEDGEEDEEMIESIENLEDLK

SEQ ID NO: 10005 - protein, 10 aa, Homo sapiens
GVCLIDEFDK

SEQ ID NO: 10006 - protein, 18 aa, Homo sapiens
FGAQQDTIEVPEKDLVDK

SEQ ID NO: 10007 - protein, 15 aa, Homo sapiens
GDINVLLCGDPGTAK

SEQ ID NO: 10008 - protein, 17 aa, Homo sapiens
IFASIAPSIYGHEDIKR

SEQ ID NO: 10009 - protein, 12 aa, Homo sapiens
GLALALFGGEPK

SEQ ID NO: 10010 - protein, 11 aa, Homo sapiens
VMLESFIDTQK

SEQ ID NO: 10011 - protein, 12 aa, Homo sapiens
VAVGELTDEDVK

SEQ ID NO: 10012 - protein, 7 aa, Homo sapiens
MYSDLRK

SEQ ID NO: 10013 - protein, 19 aa, Homo sapiens
TSGVVTSCTGVLPQLSMVK

SEQ ID NO: 10014 - protein, 13 aa, Homo sapiens
FGAQQDTIEVPEK

SEQ ID NO: 10015 - protein, 27 aa, Homo sapiens
ATEDGEEDEEMIESIENLEDLKGHSVR

SEQ ID NO: 10016 - protein, 16 aa, Homo sapiens
AESSESFTMASSPAQR

SEQ ID NO: 10017 - protein, 10 aa, Homo sapiens
AGIVTSLQAR

SEQ ID NO: 10018 - protein, 20 aa, Homo sapiens
AIFTTGQGASAVGLTAYVQR

SEQ ID NO: 10019 - protein, 28 aa, Homo sapiens
AIPELDAYEAEGLALDDEDVEELTASQR

SEQ ID NO: 10020 - protein, 13 aa, Homo sapiens
CTVIAAANPIGGR

SEQ ID NO: 10021 - protein, 13 aa, Homo sapiens
DTVDPVQDEMLAR

SEQ ID NO: 10022 - protein, 13 aa, Homo sapiens
DYVIEDDVNMAIR

SEQ ID NO: 10023 - protein, 13 aa, Homo sapiens
ESLVVNYEDLAAR

SEQ ID NO: 10024 - protein, 13 aa, Homo sapiens
ESMATGSIPITVR

SEQ ID NO: 10025 - protein, 14 aa, Homo sapiens
EWTLEAGALVLADR

SEQ ID NO: 10026 - protein, 9 aa, Homo sapiens
EWVSMAGPR

SEQ ID NO: 10027 - protein, 8 aa, Homo sapiens
FDILCVVR

SEQ ID NO: 10028 - protein, 8 aa, Homo sapiens
FVVGSHVR

SEQ ID NO: 10029 - protein, 16 aa, Homo sapiens
GLLYDSDEEDEERPAR

SEQ ID NO: 10030 - protein, 7 aa, Homo sapiens
HIESMIR

SEQ ID NO: 10031 - protein, 11 aa, Homo sapiens
ISHLPLVEELR

SEQ ID NO: 10032 - protein, 8 aa, Homo sapiens
ITNHIHVR

SEQ ID NO: 10033 - protein, 17 aa, Homo sapiens
QINIHNLSAFYDSELFR

SEQ ID NO: 10034 - protein, 9 aa, Homo sapiens
QLHLNQLIR

SEQ ID NO: 10035 - protein, 11 aa, Homo sapiens
RTDALTSSPGR

SEQ ID NO: 10036 - protein, 20 aa, Homo sapiens
YDPSLTFSENVDLTEPIISR

SEQ ID NO: 10037 - protein, 17 aa, Homo sapiens
SGPVILADEIKNPAMEK

SEQ ID NO: 10038 - protein, 12 aa, Homo sapiens
IEQSQHLFQAHK

SEQ ID NO: 10039 - protein, 12 aa, Homo sapiens
QLGDAFADLSLK

SEQ ID NO: 10040 - protein, 23 aa, Homo sapiens
HSLPSGLGLSETQITSHGFDNTK

SEQ ID NO: 10041 - protein, 17 aa, Homo sapiens
LAQTLSTQLFQMVHTQR

SEQ ID NO: 10042 - protein, 13 aa, Homo sapiens
TPGVDAPSWLEEQ

SEQ ID NO: 10043 - protein, 14 aa, Homo sapiens
IPDVAALSMGFSVK

SEQ ID NO: 10044 - protein, 18 aa, Homo sapiens
LFQENSVLSSLPLNSLSR

SEQ ID NO: 10045 - protein, 8 aa, Homo sapiens
SFDTSLIR

SEQ ID NO: 10046 - protein, 8 aa, Homo sapiens
SPGSVVFR

SEQ ID NO: 10047 - protein, 9 aa, Homo sapiens
VAAWGGKLR

SEQ ID NO: 10048 - protein, 20 aa, Homo sapiens
DIEDTLSGIQTAGCGSTFFR

SEQ ID NO: 10049 - protein, 12 aa, Homo sapiens
YEYEVDKDFSSK

SEQ ID NO: 10050 - protein, 22 aa, Homo sapiens
IDHLSFGELVPAIINPLDGTEK

SEQ ID NO: 10051 - protein, 13 aa, Homo sapiens
ISADTHQFSVTER

SEQ ID NO: 10052 - protein, 13 aa, Homo sapiens
LQEEHSLQDVIFK

SEQ ID NO: 10053 - protein, 23 aa, Homo sapiens
QYDAYGSAGFDPGASGSQHSYWK

SEQ ID NO: 10054 - protein, 24 aa, Homo sapiens
KQYDAYGSAGFDPGASGSQHSYWK

SEQ ID NO: 10055 - protein, 14 aa, Homo sapiens
INSYGYGDHYIHIK

SEQ ID NO: 10056 - protein, 17 aa, Homo sapiens
FSQLAEAYEVLSDEVKR

SEQ ID NO: 10057 - protein, 13 aa, Homo sapiens
REAGEDEEGFLSK

SEQ ID NO: 10058 - protein, 16 aa, Homo sapiens
FSQLAEAYEVLSDEVK

SEQ ID NO: 10059 - protein, 12 aa, Homo sapiens
EFTVNIMDTCER

SEQ ID NO: 10060 - protein, 12 aa, Homo sapiens
GGPTVDPEELFR

SEQ ID NO: 10061 - protein, 12 aa, Homo sapiens
GSIIISPCVVCR

SEQ ID NO: 10062 - protein, 16 aa, Homo sapiens
VMIPVPAGVEDGQTVR

SEQ ID NO: 10063 - protein, 23 aa, Homo sapiens
VQHCHYCGGSGMETINTGPFVMR

SEQ ID NO: 10064 - protein, 17 aa, Homo sapiens
IIEELQDLGPQVWSETK

SEQ ID NO: 10065 - protein, 14 aa, Homo sapiens
LGGPNQDLTVLEMK

SEQ ID NO: 10066 - protein, 11 aa, Homo sapiens
ELEGILLPSDR

SEQ ID NO: 10067 - protein, 22 aa, Homo sapiens
EREEETPAYQGPGIPELLSPMR

SEQ ID NO: 10068 - protein, 10 aa, Homo sapiens
LPAGAIHFQR

SEQ ID NO: 10069 - protein, 19 aa, Homo sapiens
RVWGSPGGEGTGDLDEFDF

SEQ ID NO: 10070 - protein, 14 aa, Homo sapiens
VDEPLSCSYVLTIR

SEQ ID NO: 10071 - protein, 12 aa, Homo sapiens
TLVAVKPDGVQR

SEQ ID NO: 10072 - protein, 9 aa, Homo sapiens
APGPSLLVR

SEQ ID NO: 10073 - protein, 14 aa, Homo sapiens
YVSWYQQHPGKAPK

SEQ ID NO: 10074 - protein, 11 aa, Homo sapiens
YVSWYQQHPGK

SEQ ID NO: 10075 - protein, 23 aa, Homo sapiens
GFGFVEFEDPRDADDAVYELDGK

SEQ ID NO: 10076 - protein, 15 aa, Homo sapiens
LNEGVVEFASYGDLK

SEQ ID NO: 10077 - protein, 7 aa, Homo sapiens
VSWQDLK

SEQ ID NO: 10078 - protein, 12 aa, Homo sapiens
DADDAVYELDGK

SEQ ID NO: 10079 - protein, 14 aa, Homo sapiens
QAGEVTFADAHRPK

SEQ ID NO: 10080 - protein, 11 aa, Homo sapiens
GFGFVEFEDPR

SEQ ID NO: 10081 - protein, 10 aa, Homo sapiens
KESYSIYVYK

SEQ ID NO: 10082 - protein, 9 aa, Homo sapiens
ESYSIYVYK

SEQ ID NO: 10083 - protein, 18 aa, Homo sapiens
LLLDEFLGYDDILMSSVK

SEQ ID NO: 10084 - protein, 14 aa, Homo sapiens
LSIPVMVVTLDPTR

SEQ ID NO: 10085 - protein, 13 aa, Homo sapiens
TPNLNPNPLINVR

SEQ ID NO: 10086 - protein, 18 aa, Homo sapiens
LKNTSEQDQPMGGWEMIR

SEQ ID NO: 10087 - protein, 12 aa, Homo sapiens
CQSLTEDLEFRK

SEQ ID NO: 10088 - protein, 10 aa, Homo sapiens
KIGDTSVSYK

SEQ ID NO: 10089 - protein, 12 aa, Homo sapiens
NQNSWGTGEDVK

SEQ ID NO: 10090 - protein, 9 aa, Homo sapiens
QLADETLLK

SEQ ID NO: 10091 - protein, 7 aa, Homo sapiens
LAVYIDK

SEQ ID NO: 10092 - protein, 8 aa, Homo sapiens
LQEKEELR

SEQ ID NO: 10093 - protein, 9 aa, Homo sapiens
IGDTSVSYK

SEQ ID NO: 10094 - protein, 12 aa, Homo sapiens
DAALATALGDKK

SEQ ID NO: 10095 - protein, 17 aa, Homo sapiens
DQMQQQLNDYEQLLDVK

SEQ ID NO: 10096 - protein, 10 aa, Homo sapiens
KQLADETLLK

SEQ ID NO: 10097 - protein, 14 aa, Homo sapiens
CKAEHDQLLLNYAK

SEQ ID NO: 10098 - protein, 13 aa, Homo sapiens
LYKEELEQTYHAK

SEQ ID NO: 10099 - protein, 12 aa, Homo sapiens
AEHDQLLLNYAK

SEQ ID NO: 10100 - protein, 11 aa, Homo sapiens
LREYEAALNSK

SEQ ID NO: 10101 - protein, 11 aa, Homo sapiens
DAALATALGDK

SEQ ID NO: 10102 - protein, 23 aa, Homo sapiens
EMAEIRDQMQQQLNDYEQLLDVK

SEQ ID NO: 10103 - protein, 10 aa, Homo sapiens
IQELEDLLAK

SEQ ID NO: 10104 - protein, 7 aa, Homo sapiens
QIEYEYK

SEQ ID NO: 10105 - protein, 9 aa, Homo sapiens
KLLEGEEER

SEQ ID NO: 10106 - protein, 7 aa, Homo sapiens
LQIELGK

SEQ ID NO: 10107 - protein, 13 aa, Homo sapiens
IESLSSQLSNLQK

SEQ ID NO: 10108 - protein, 8 aa, Homo sapiens
GRELTGLK

SEQ ID NO: 10109 - protein, 24 aa, Homo sapiens
SLEGDLEDLKDQIAQLEASLAAAK

SEQ ID NO: 10110 - protein, 12 aa, Homo sapiens
AGGPTTPLSPTR

SEQ ID NO: 10111 - protein, 11 aa, Homo sapiens
ALYETELADAR

SEQ ID NO: 10112 - protein, 9 aa, Homo sapiens
ATATPVPPR

SEQ ID NO: 10113 - protein, 11 aa, Homo sapiens
CQSLTEDLEFR

SEQ ID NO: 10114 - protein, 7 aa, Homo sapiens
EELMESR

SEQ ID NO: 10115 - protein, 11 aa, Homo sapiens
LALDMEISAYR

SEQ ID NO: 10116 - protein, 9 aa, Homo sapiens
LAQALHEMR

SEQ ID NO: 10117 - protein, 8 aa, Homo sapiens
LLEGEEER

SEQ ID NO: 10118 - protein, 8 aa, Homo sapiens
LSPSPSSR

SEQ ID NO: 10119 - protein, 14 aa, Homo sapiens
LSSEMNTSTVNSAR

SEQ ID NO: 10120 - protein, 8 aa, Homo sapiens
LVEVDSGR

SEQ ID NO: 10121 - protein, 10 aa, Homo sapiens
NSQGEEVAQR

SEQ ID NO: 10122 - protein, 16 aa, Homo sapiens
NTSEQDQPMGGWEMIR

SEQ ID NO: 10123 - protein, 20 aa, Homo sapiens
SLETENSALQLQVTEREEVR

SEQ ID NO: 10124 - protein, 11 aa, Homo sapiens
SMYEEEINETR

SEQ ID NO: 10125 - protein, 12 aa, Homo sapiens
SMYEEEINETRR

SEQ ID NO: 10126 - protein, 30 aa, Homo sapiens
TTIPEEEEEEEEAAGVVVEEELFHQQGTPR

SEQ ID NO: 10127 - protein, 13 aa, Homo sapiens
TIDDLEDELYAQK

SEQ ID NO: 10128 - protein, 16 aa, Homo sapiens
AISEELDHALNDMTSI

SEQ ID NO: 10129 - protein, 18 aa, Homo sapiens
ADTSLNNCEGAAGSTSEK

SEQ ID NO: 10130 - protein, 9 aa, Homo sapiens
ENPVVVAEK

SEQ ID NO: 10131 - protein, 14 aa, Homo sapiens
SQSIVSSVFSEAWK

SEQ ID NO: 10132 - protein, 9 aa, Homo sapiens
QVLDNLMDK

SEQ ID NO: 10133 - protein, 18 aa, Homo sapiens
SIFDDDMDDIFSTGIQAK

SEQ ID NO: 10134 - protein, 20 aa, Homo sapiens
GLFDDEDEESDLFTEASQDR

SEQ ID NO: 10135 - protein, 16 aa, Homo sapiens
LAAQESSEAEDMSVPR

SEQ ID NO: 10136 - protein, 13 aa, Homo sapiens
KLEMEDYPSFMAK

SEQ ID NO: 10137 - protein, 18 aa, Homo sapiens
ALLTTNQLPQPDVFPLFK

SEQ ID NO: 10138 - protein, 14 aa, Homo sapiens
TPGFSVQSISDFEK

SEQ ID NO: 10139 - protein, 18 aa, Homo sapiens
DLDEEIFDDDDFYHQLLR

SEQ ID NO: 10140 - protein, 13 aa, Homo sapiens
NQIALWDQLLEGR

SEQ ID NO: 10141 - protein, 17 aa, Homo sapiens
PSEADPEADPEEATAAR

SEQ ID NO: 10142 - protein, 15 aa, Homo sapiens
SLFGQLHPPDEGHGD

SEQ ID NO: 10143 - protein, 17 aa, Homo sapiens
SLVGLQEELLFQYPDTR

SEQ ID NO: 10144 - protein, 14 aa, Homo sapiens
TSSLDPNDQVAMGR

SEQ ID NO: 10145 - protein, 12 aa, Homo sapiens
HLNDDDVTGSVK

SEQ ID NO: 10146 - protein, 19 aa, Homo sapiens
HVQNQVDEVIDVMQENITK

SEQ ID NO: 10147 - protein, 14 aa, Homo sapiens
SESLSDNATAFSNR

SEQ ID NO: 10148 - protein, 16 aa, Homo sapiens
KVYEDSGIPLPAESPK

SEQ ID NO: 10149 - protein, 13 aa, Homo sapiens
FGDDLNHISCVIK

SEQ ID NO: 10150 - protein, 14 aa, Homo sapiens
VGEIFSAAGAAFTK

SEQ ID NO: 10151 - protein, 30 aa, Homo sapiens
VASGVLSPPPAAPPPSSSSVPEAGGPPIKK

SEQ ID NO: 10152 - protein, 20 aa, Homo sapiens
LGELTMQLHPVADSSPAGAK

SEQ ID NO: 10153 - protein, 15 aa, Homo sapiens
VYEDSGIPLPAESPK

SEQ ID NO: 10154 - protein, 14 aa, Homo sapiens
RFGDDLNHISCVIK

SEQ ID NO: 10155 - protein, 7 aa, Homo sapiens
KLNFDQA

SEQ ID NO: 10156 - protein, 10 aa, Homo sapiens
WTETEIEMLR

SEQ ID NO: 10157 - protein, 9 aa, Homo sapiens
NDLEDFFMK

SEQ ID NO: 10158 - protein, 9 aa, Homo sapiens
SVINDPIYK

SEQ ID NO: 10159 - protein, 10 aa, Homo sapiens
LEVYPTSLTK

SEQ ID NO: 10160 - protein, 9 aa, Homo sapiens
TILEELVQR

SEQ ID NO: 10161 - protein, 20 aa, Homo sapiens
ATDTINSQGQFPSYLETVTK

SEQ ID NO: 10162 - protein, 20 aa, Homo sapiens
ALEEPGPAADPTAFQGPWAR

SEQ ID NO: 10163 - protein, 11 aa, Homo sapiens
CSLLDPFAAVR

SEQ ID NO: 10164 - protein, 12 aa, Homo sapiens
EGSGLFPDLLVR

SEQ ID NO: 10165 - protein, 8 aa, Homo sapiens
LAGPVPAR

SEQ ID NO: 10166 - protein, 17 aa, Homo sapiens
LIPLLLSSLNDEVPEVR

SEQ ID NO: 10167 - protein, 13 aa, Homo sapiens
NHLNTHTGTRPHK

SEQ ID NO: 10168 - protein, 15 aa, Homo sapiens
YHDPNFVPAAFVCSK

SEQ ID NO: 10169 - protein, 24 aa, Homo sapiens
EGLAESEPMICHTLPLPEGFQVVK

SEQ ID NO: 10170 - protein, 16 aa, Homo sapiens
THSGEKPYECYICHAR

SEQ ID NO: 10171 - protein, 8 aa, Homo sapiens
YALIQHQK

SEQ ID NO: 10172 - protein, 18 aa, Homo sapiens
MEGDAVEAIVEESETFIK

SEQ ID NO: 10173 - protein, 12 aa, Homo sapiens
FHCPHCDTVIAR

SEQ ID NO: 10174 - protein, 8 aa, Homo sapiens
SDLGVHLR

SEQ ID NO: 10175 - protein, 13 aa, Homo sapiens
TFQCELCSYTCPR

SEQ ID NO: 10176 - protein, 15 aa, Homo sapiens
THTGEKPYACSHCDK

SEQ ID NO: 10177 - protein, 9 aa, Homo sapiens
YCDAVFHER

SEQ ID NO: 10178 - protein, 19 aa, Homo sapiens
HALDAHQQSIPAVLEIPSK

SEQ ID NO: 10179 - protein, 21 aa, Homo sapiens
HPNFLVVEKDTTINEIEDTFR

SEQ ID NO: 10180 - protein, 27 aa, Homo sapiens
HALDAHQQSIPAVLEIPSKEHPYDAAK

SEQ ID NO: 10181 - protein, 9 aa, Homo sapiens
HPNFLVVEK

SEQ ID NO: 10182 - protein, 23 aa, Homo sapiens
NRHPNFLVVEKDTTINEIEDTFR

SEQ ID NO: 10183 - protein, 17 aa, Homo sapiens
DDIGIILINQYIAEMVR

SEQ ID NO: 10184 - protein, 12 aa, Homo sapiens
DTTINEIEDTFR

SEQ ID NO: 10185 - protein, 9 aa, Homo sapiens
GMFTAEDLR

SEQ ID NO: 10186 - protein, 11 aa, Homo sapiens
NRHPNFLVVEK

SEQ ID NO: 10187 - protein, 17 aa, Homo sapiens
LQEYNIPGVIQSVIGWK

SEQ ID NO: 10188 - protein, 19 aa, Homo sapiens
AESAPLPVSADDTPEVLNR

SEQ ID NO: 10189 - protein, 12 aa, Homo sapiens
VDGETASDSESR

SEQ ID NO: 10190 - protein, 12 aa, Homo sapiens
KLQEESDLELAK

SEQ ID NO: 10191 - protein, 9 aa, Homo sapiens
GVVPGGGLK

SEQ ID NO: 10192 - protein, 13 aa, Homo sapiens
VLTPEEQLADKLR

SEQ ID NO: 10193 - protein, 8 aa, Homo sapiens
DDFTEFGK

SEQ ID NO: 10194 - protein, 11 aa, Homo sapiens
VLTPEEQLADK

SEQ ID NO: 10195 - protein, 12 aa, Homo sapiens
ITNSLTVLCSEK

SEQ ID NO: 10196 - protein, 10 aa, Homo sapiens
KGVVPGGGLK

SEQ ID NO: 10197 - protein, 11 aa, Homo sapiens
LQEESDLELAK

SEQ ID NO: 10198 - protein, 8 aa, Homo sapiens
DKITQYEK

SEQ ID NO: 10199 - protein, 26 aa, Homo sapiens
AAAAAAAGDSDSWDADAFSVEDPVRK

SEQ ID NO: 10200 - protein, 8 aa, Homo sapiens
LEEPEEPK

SEQ ID NO: 10201 - protein, 9 aa, Homo sapiens
RLEEPEEPK

SEQ ID NO: 10202 - protein, 25 aa, Homo sapiens
AAAAAAAGDSDSWDADAFSVEDPVR

SEQ ID NO: 10203 - protein, 20 aa, Homo sapiens
ETFGVNNAVYGIDAMNPSSR

SEQ ID NO: 10204 - protein, 12 aa, Homo sapiens
QSTVLAPVIDLK

SEQ ID NO: 10205 - protein, 16 aa, Homo sapiens
SMGGAAIAPPTSLVEK

SEQ ID NO: 10206 - protein, 16 aa, Homo sapiens
CVIFEIPGAPDDEAVR

SEQ ID NO: 10207 - protein, 11 aa, Homo sapiens
DFPYEEDSRPR

SEQ ID NO: 10208 - protein, 22 aa, Homo sapiens
IDISPAPENPHYCLTPELLQVK

SEQ ID NO: 10209 - protein, 12 aa, Homo sapiens
IANMFELSVPFR

SEQ ID NO: 10210 - protein, 15 aa, Homo sapiens
NLLYIYPQSLNFANR

SEQ ID NO: 10211 - protein, 9 aa, Homo sapiens
QEEETAQLK

SEQ ID NO: 10212 - protein, 10 aa, Homo sapiens
KQEEETAQLK

SEQ ID NO: 10213 - protein, 12 aa, Homo sapiens
ESQLQQEDPMDR

SEQ ID NO: 10214 - protein, 17 aa, Homo sapiens
HLQLAIRGDEELDSLIK

SEQ ID NO: 10215 - protein, 29 aa, Homo sapiens
VGATAAVYSAAILEYLTAEVLELAGNASK

SEQ ID NO: 10216 - protein, 10 aa, Homo sapiens
GDEELDSLIK

SEQ ID NO: 10217 - protein, 14 aa, Homo sapiens
ATIAGGGVIPHIHK

SEQ ID NO: 10218 - protein, 12 aa, Homo sapiens
VVVHQETEIADE

SEQ ID NO: 10219 - protein, 11 aa, Homo sapiens
GVPWNFTFNVK

SEQ ID NO: 10220 - protein, 14 aa, Homo sapiens
TQTVTISDNANAVK

SEQ ID NO: 10221 - protein, 20 aa, Homo sapiens
IVITGDADIDHDQVLVQAIK

SEQ ID NO: 10222 - protein, 9 aa, Homo sapiens
LTSTDTIPK

SEQ ID NO: 10223 - protein, 16 aa, Homo sapiens
SMTPAQADLEFLENAK

SEQ ID NO: 10224 - protein, 15 aa, Homo sapiens
VSLLDDTVYECVVEK

SEQ ID NO: 10225 - protein, 16 aa, Homo sapiens
IRPGEQEQYESTIGFK

SEQ ID NO: 10226 - protein, 10 aa, Homo sapiens
DVPIVHTETK

SEQ ID NO: 10227 - protein, 10 aa, Homo sapiens
HHASISELKK

SEQ ID NO: 10228 - protein, 11 aa, Homo sapiens
APIAAPEPELK

SEQ ID NO: 10229 - protein, 8 aa, Homo sapiens
LSTHSPFR

SEQ ID NO: 10230 - protein, 10 aa, Homo sapiens
NFMESVPEPR

SEQ ID NO: 10231 - protein, 13 aa, Homo sapiens
SLDGAAAVDSADR

SEQ ID NO: 10232 - protein, 10 aa, Homo sapiens
VCVEHHTFFR

SEQ ID NO: 10233 - protein, 11 aa, Homo sapiens
LFQYASTDMDK

SEQ ID NO: 10234 - protein, 9 aa, Homo sapiens
NTMPSVNQR

SEQ ID NO: 10235 - protein, 10 aa, Homo sapiens
TNSDIVETLR

SEQ ID NO: 10236 - protein, 12 aa, Homo sapiens
FIHVSHLNANIK

SEQ ID NO: 10237 - protein, 10 aa, Homo sapiens
NFDFEDVFVK

SEQ ID NO: 10238 - protein, 12 aa, Homo sapiens
FGPIPLGSLGWK

SEQ ID NO: 10239 - protein, 20 aa, Homo sapiens
LPHLPGLEDLGIQATPLELK

SEQ ID NO: 10240 - protein, 13 aa, Homo sapiens
WLSAEIEDVKPAK

SEQ ID NO: 10241 - protein, 10 aa, Homo sapiens
FLNSFASMHR

SEQ ID NO: 10242 - protein, 10 aa, Homo sapiens
MGSQVIIPYR

SEQ ID NO: 10243 - protein, 9 aa, Homo sapiens
SFAFVGPSR

SEQ ID NO: 10244 - protein, 13 aa, Homo sapiens
VFEISPFEPWITR

SEQ ID NO: 10245 - protein, 14 aa, Homo sapiens
VVQHSNVVINLIGR

SEQ ID NO: 10246 - protein, 8 aa, Homo sapiens
YIFAVAHR

SEQ ID NO: 10247 - protein, 8 aa, Homo sapiens
YVVNHLGR

SEQ ID NO: 10248 - protein, 19 aa, Homo sapiens
HATGNYIIIMDADLSHHPK

SEQ ID NO: 10249 - protein, 12 aa, Homo sapiens
LGLGTAYIHGMK

SEQ ID NO: 10250 - protein, 13 aa, Homo sapiens
KLGLGTAYIHGMK

SEQ ID NO: 10251 - protein, 8 aa, Homo sapiens
DVAEQLEK

SEQ ID NO: 10252 - protein, 11 aa, Homo sapiens
LGGNEIVSFLK

SEQ ID NO: 10253 - protein, 11 aa, Homo sapiens
EGNFDIVSGTR

SEQ ID NO: 10254 - protein, 12 aa, Homo sapiens
ENLPLIVWLLVK

SEQ ID NO: 10255 - protein, 11 aa, Homo sapiens
GANFLTQILLR

SEQ ID NO: 10256 - protein, 22 aa, Homo sapiens
GANFLTQILLRPGASDLTGSFR

SEQ ID NO: 10257 - protein, 11 aa, Homo sapiens
PGASDLTGSFR

SEQ ID NO: 10258 - protein, 16 aa, Homo sapiens
QLNYTIGEVPISFVDR

SEQ ID NO: 10259 - protein, 11 aa, Homo sapiens
YSVLLPTYNER

SEQ ID NO: 10260 - protein, 30 aa, Homo sapiens
VTVDTGVIPASEEKAETPTAAEDDNEGDKK

SEQ ID NO: 10261 - protein, 20 aa, Homo sapiens
TLAGLPLLVAYKEDEIPVLK

SEQ ID NO: 10262 - protein, 10 aa, Homo sapiens
SDWQLIVELK

SEQ ID NO: 10263 - protein, 9 aa, Homo sapiens
GLLLPPPMK

SEQ ID NO: 10264 - protein, 25 aa, Homo sapiens
SEDSTKDDIDLDALAAEIEGAGAAK

SEQ ID NO: 10265 - protein, 12 aa, Homo sapiens
TLAGLPLLVAYK

SEQ ID NO: 10266 - protein, 18 aa, Homo sapiens
ETVAVKPTENNEEEFTSK

SEQ ID NO: 10267 - protein, 14 aa, Homo sapiens
APIICVLGHVDTGK

SEQ ID NO: 10268 - protein, 16 aa, Homo sapiens
AETPTAAEDDNEGDKK

SEQ ID NO: 10269 - protein, 12 aa, Homo sapiens
KSPDSDVAATLK

SEQ ID NO: 10270 - protein, 8 aa, Homo sapiens
KFEEETVK

SEQ ID NO: 10271 - protein, 11 aa, Homo sapiens
QSIDALKDWFR

SEQ ID NO: 10272 - protein, 7 aa, Homo sapiens
LEELEAK

SEQ ID NO: 10273 - protein, 12 aa, Homo sapiens
LLQAQGVEVPSK

SEQ ID NO: 10274 - protein, 7 aa, Homo sapiens
QTLNAIK

SEQ ID NO: 10275 - protein, 9 aa, Homo sapiens
CPFIVALNK

SEQ ID NO: 10276 - protein, 8 aa, Homo sapiens
DELIHELK

SEQ ID NO: 10277 - protein, 8 aa, Homo sapiens
IPQQLESK

SEQ ID NO: 10278 - protein, 8 aa, Homo sapiens
RLEELEAK

SEQ ID NO: 10279 - protein, 8 aa, Homo sapiens
HIAVFPCK

SEQ ID NO: 10280 - protein, 21 aa, Homo sapiens
LKEGDTIIVPGVEGPIVTQIR

SEQ ID NO: 10281 - protein, 16 aa, Homo sapiens
TSEVPYAGINIGPVHK

SEQ ID NO: 10282 - protein, 14 aa, Homo sapiens
VTVDTGVIPASEEK

SEQ ID NO: 10283 - protein, 9 aa, Homo sapiens
NTKDEFEER

SEQ ID NO: 10284 - protein, 11 aa, Homo sapiens
HFEATDILVSK

SEQ ID NO: 10285 - protein, 31 aa, Homo sapiens
HTHVQDGEAGGITQQIGATNVPLEAINEQTK

SEQ ID NO: 10286 - protein, 8 aa, Homo sapiens
AMQEALAK

SEQ ID NO: 10287 - protein, 7 aa, Homo sapiens
AQVMEVK

SEQ ID NO: 10288 - protein, 10 aa, Homo sapiens
QGTPMCVPSK

SEQ ID NO: 10289 - protein, 12 aa, Homo sapiens
DAQEMADSLGVR

SEQ ID NO: 10290 - protein, 15 aa, Homo sapiens
DPIVMGVTVEAGQVK

SEQ ID NO: 10291 - protein, 19 aa, Homo sapiens
EGDTIIVPGVEGPIVTQIR

SEQ ID NO: 10292 - protein, 10 aa, Homo sapiens
ILPQYIFNSR

SEQ ID NO: 10293 - protein, 19 aa, Homo sapiens
IPGMLIIDTPGHESFSNLR

SEQ ID NO: 10294 - protein, 9 aa, Homo sapiens
RLAHCEELR

SEQ ID NO: 10295 - protein, 10 aa, Homo sapiens
QNQVEFEGLK

SEQ ID NO: 10296 - protein, 12 aa, Homo sapiens
AGLLATLQDTQK

SEQ ID NO: 10297 - protein, 13 aa, Homo sapiens
GRYEAEGQALTEK

SEQ ID NO: 10298 - protein, 9 aa, Homo sapiens
LASVAQELK

SEQ ID NO: 10299 - protein, 24 aa, Homo sapiens
ADGGTGDSSPSPGSSLPSPLSDPR

SEQ ID NO: 10300 - protein, 13 aa, Homo sapiens
CDEYITQLDEMQR

SEQ ID NO: 10301 - protein, 10 aa, Homo sapiens
EINQNVEIQR

SEQ ID NO: 10302 - protein, 12 aa, Homo sapiens
LELLELDHEQTR

SEQ ID NO: 10303 - protein, 10 aa, Homo sapiens
LSHELAETTR

SEQ ID NO: 10304 - protein, 9 aa, Homo sapiens
LTENLSALR

SEQ ID NO: 10305 - protein, 11 aa, Homo sapiens
LVMEAQPEWLR

SEQ ID NO: 10306 - protein, 12 aa, Homo sapiens
NVLTNTQSENER

SEQ ID NO: 10307 - protein, 11 aa, Homo sapiens
IQVLVEPDHFK

SEQ ID NO: 10308 - protein, 11 aa, Homo sapiens
GNDVAFHFNPR

SEQ ID NO: 10309 - protein, 17 aa, Homo sapiens
IISSIEQKEENKGGEDK

SEQ ID NO: 10310 - protein, 12 aa, Homo sapiens
KEAAENSLVAYK

SEQ ID NO: 10311 - protein, 29 aa, Homo sapiens
AAFDDAIAELDTLSEESYKDSTLIMQLLR

SEQ ID NO: 10312 - protein, 17 aa, Homo sapiens
LAEQAERYDEMVESMKK

SEQ ID NO: 10313 - protein, 10 aa, Homo sapiens
YDEMVESMKK

SEQ ID NO: 10314 - protein, 19 aa, Homo sapiens
DNLTLWTSDMQGDGEEQNK

SEQ ID NO: 10315 - protein, 24 aa, Homo sapiens
LICCDILDVLDKHLIPAANTGESK

SEQ ID NO: 10316 - protein, 8 aa, Homo sapiens
QMVETELK

SEQ ID NO: 10317 - protein, 16 aa, Homo sapiens
LAEQAERYDEMVESMK

SEQ ID NO: 10318 - protein, 12 aa, Homo sapiens
IISSIEQKEENK

SEQ ID NO: 10319 - protein, 11 aa, Homo sapiens
EAAENSLVAYK

SEQ ID NO: 10320 - protein, 30 aa, Homo sapiens
DNLTLWTSDMQGDGEEQNKEALQDVEDENQ

SEQ ID NO: 10321 - protein, 12 aa, Homo sapiens
LICCDILDVLDK

SEQ ID NO: 10322 - protein, 8 aa, Homo sapiens
IISSIEQK

SEQ ID NO: 10323 - protein, 19 aa, Homo sapiens
AAFDDAIAELDTLSEESYK

SEQ ID NO: 10324 - protein, 12 aa, Homo sapiens
MDDREDLVYQAK

SEQ ID NO: 10325 - protein, 12 aa, Homo sapiens
HLIPAANTGESK

SEQ ID NO: 10326 - protein, 9 aa, Homo sapiens
YDEMVESMK

SEQ ID NO: 10327 - protein, 12 aa, Homo sapiens
YLAEFATGNDRK

SEQ ID NO: 10328 - protein, 8 aa, Homo sapiens
NLLSVAYK

SEQ ID NO: 10329 - protein, 17 aa, Homo sapiens
AASDIAMTELPPTHPIR

SEQ ID NO: 10330 - protein, 10 aa, Homo sapiens
DSTLIMQLLR

SEQ ID NO: 10331 - protein, 11 aa, Homo sapiens
EALQDVEDENQ

SEQ ID NO: 10332 - protein, 7 aa, Homo sapiens
LAEQAER

SEQ ID NO: 10333 - protein, 13 aa, Homo sapiens
VAGMDVELTVEER

SEQ ID NO: 10334 - protein, 11 aa, Homo sapiens
YLAEFATGNDR

SEQ ID NO: 10335 - protein, 11 aa, Homo sapiens
TVDDVIKEQNR

SEQ ID NO: 10336 - protein, 10 aa, Homo sapiens
TLQTMQNFQK

SEQ ID NO: 10337 - protein, 10 aa, Homo sapiens
ATISDEEIER

SEQ ID NO: 10338 - protein, 20 aa, Homo sapiens
SCVEEPEPEPEAAEGDGDKK

SEQ ID NO: 10339 - protein, 10 aa, Homo sapiens
AGDLLEDSPK

SEQ ID NO: 10340 - protein, 20 aa, Homo sapiens
GNAEGSSDEEGKLVIDEPAK

SEQ ID NO: 10341 - protein, 17 aa, Homo sapiens
KGFSEGLWEIENNPTVK

SEQ ID NO: 10342 - protein, 10 aa, Homo sapiens
IDEMPEAAVK

SEQ ID NO: 10343 - protein, 27 aa, Homo sapiens
EAENPEGEEKEAATLEVERPLPMEVEK

SEQ ID NO: 10344 - protein, 11 aa, Homo sapiens
DLFPYEESKEK

SEQ ID NO: 10345 - protein, 11 aa, Homo sapiens
RAGDLLEDSPK

SEQ ID NO: 10346 - protein, 16 aa, Homo sapiens
GFSEGLWEIENNPTVK

SEQ ID NO: 10347 - protein, 27 aa, Homo sapiens
GPPQEEEEEEDEEEEATKEDAEAPGIR

SEQ ID NO: 10348 - protein, 9 aa, Homo sapiens
DLFPYEESK

SEQ ID NO: 10349 - protein, 17 aa, Homo sapiens
EAATLEVERPLPMEVEK

SEQ ID NO: 10350 - protein, 32 aa, Homo sapiens
GPPQEEEEEEDEEEEATKEDAEAPGIRDHESL

SEQ ID NO: 10351 - protein, 8 aa, Homo sapiens
CGDLVFAK

SEQ ID NO: 10352 - protein, 8 aa, Homo sapiens
GYPHWPAR

SEQ ID NO: 10353 - protein, 11 aa, Homo sapiens
NSTPSEPGSGR

SEQ ID NO: 10354 - protein, 14 aa, Homo sapiens
KIYANFFPYGDASK

SEQ ID NO: 10355 - protein, 14 aa, Homo sapiens
DCPTGHLTVDEFKK

SEQ ID NO: 10356 - protein, 10 aa, Homo sapiens
MPEDESTPEK

SEQ ID NO: 10357 - protein, 11 aa, Homo sapiens
MPEDESTPEKR

SEQ ID NO: 10358 - protein, 12 aa, Homo sapiens
SEMLEIVQAIYK

SEQ ID NO: 10359 - protein, 13 aa, Homo sapiens
IYANFFPYGDASK

SEQ ID NO: 10360 - protein, 13 aa, Homo sapiens
DCPTGHLTVDEFK

SEQ ID NO: 10361 - protein, 15 aa, Homo sapiens
ENTEFTDHELQEWYK

SEQ ID NO: 10362 - protein, 7 aa, Homo sapiens
FAEHVFR

SEQ ID NO: 10363 - protein, 12 aa, Homo sapiens
LLQCDPSSASQF

SEQ ID NO: 10364 - protein, 10 aa, Homo sapiens
LRPEVLQDLR

SEQ ID NO: 10365 - protein, 8 aa, Homo sapiens
LSLEEFIR

SEQ ID NO: 10366 - protein, 13 aa, Homo sapiens
TFDTNGDGTIDFR

SEQ ID NO: 10367 - protein, 16 aa, Homo sapiens
WAFSMYDLDGNGYISR

SEQ ID NO: 10368 - protein, 9 aa, Homo sapiens
GWNWVDVVK

SEQ ID NO: 10369 - protein, 10 aa, Homo sapiens
ELSPVSFQYR

SEQ ID NO: 10370 - protein, 14 aa, Homo sapiens
SANEDQEMELEALR

SEQ ID NO: 10371 - protein, 10 aa, Homo sapiens
SIYEGDESFR

SEQ ID NO: 10372 - protein, 22 aa, Homo sapiens
FYDMAAEASPDAQVPVFLALCK

SEQ ID NO: 10373 - protein, 10 aa, Homo sapiens
SCHTAVELFK

SEQ ID NO: 10374 - protein, 10 aa, Homo sapiens
TTLTSDESVK

SEQ ID NO: 10375 - protein, 22 aa, Homo sapiens
AFDYFNLAANAGNSHAMAFLGK

SEQ ID NO: 10376 - protein, 9 aa, Homo sapiens
LMTAYNSYK

SEQ ID NO: 10377 - protein, 14 aa, Homo sapiens
QMQEAEMMYQTGMK

SEQ ID NO: 10378 - protein, 12 aa, Homo sapiens
WGFCETEEEAAK

SEQ ID NO: 10379 - protein, 21 aa, Homo sapiens
LASEQQHSAQAMFNLGYMHEK

SEQ ID NO: 10380 - protein, 21 aa, Homo sapiens
AADMGNPVGQSGLGMAYLYGR

SEQ ID NO: 10381 - protein, 10 aa, Homo sapiens
AASQGYTVAR

SEQ ID NO: 10382 - protein, 7 aa, Homo sapiens
ALLHWNR

SEQ ID NO: 10383 - protein, 20 aa, Homo sapiens
LVANHVASDISLTGGSVVQR

SEQ ID NO: 10384 - protein, 16 aa, Homo sapiens
PAPPQQEGPPEQQPPQ

SEQ ID NO: 10385 - protein, 14 aa, Homo sapiens
QHQDMPAPRPPGPR

SEQ ID NO: 10386 - protein, 19 aa, Homo sapiens
YWAGIGVLQSCESALTHYR

SEQ ID NO: 10387 - protein, 9 aa, Homo sapiens
ASGAQLEAK

SEQ ID NO: 10388 - protein, 10 aa, Homo sapiens
RDFAPPGQQK

SEQ ID NO: 10389 - protein, 9 aa, Homo sapiens
DFAPPGQQK

SEQ ID NO: 10390 - protein, 12 aa, Homo sapiens
EAPVDVLTQIGR

SEQ ID NO: 10391 - protein, 13 aa, Homo sapiens
REAPVDVLTQIGR

SEQ ID NO: 10392 - protein, 11 aa, Homo sapiens
KYMEENDQLKK

SEQ ID NO: 10393 - protein, 7 aa, Homo sapiens
LLEEHAK

SEQ ID NO: 10394 - protein, 20 aa, Homo sapiens
LVTLISQQATLLASNEAFKK

SEQ ID NO: 10395 - protein, 10 aa, Homo sapiens
YMEENDQLKK

SEQ ID NO: 10396 - protein, 11 aa, Homo sapiens
LQAAVDGPMDK

SEQ ID NO: 10397 - protein, 19 aa, Homo sapiens
LVTLISQQATLLASNEAFK

SEQ ID NO: 10398 - protein, 9 aa, Homo sapiens
YMEENDQLK

SEQ ID NO: 10399 - protein, 15 aa, Homo sapiens
LDVGNAEVKLEEENR

SEQ ID NO: 10400 - protein, 16 aa, Homo sapiens
VNLQNNPGAMEHFHMK

SEQ ID NO: 10401 - protein, 9 aa, Homo sapiens
LDVGNAEVK

SEQ ID NO: 10402 - protein, 14 aa, Homo sapiens
LQAAVDGPMDKKEE

SEQ ID NO: 10403 - protein, 9 aa, Homo sapiens
LKDELASTK

SEQ ID NO: 10404 - protein, 9 aa, Homo sapiens
AENQVLAMR

SEQ ID NO: 10405 - protein, 16 aa, Homo sapiens
IVSLEPAYPPVFYLNK

SEQ ID NO: 10406 - protein, 18 aa, Homo sapiens
ATQFTGATGAIMTTETTK

SEQ ID NO: 10407 - protein, 14 aa, Homo sapiens
ILDVNDNIPVVENK

SEQ ID NO: 10408 - protein, 10 aa, Homo sapiens
AWITAPVALR

SEQ ID NO: 10409 - protein, 23 aa, Homo sapiens
VLAPASTLQSSYQIPTENSMTAR

SEQ ID NO: 10410 - protein, 9 aa, Homo sapiens
VTQEIVTER

SEQ ID NO: 10411 - protein, 24 aa, Homo sapiens
VYAPASTLVDQPYANEGTVVVTER

SEQ ID NO: 10412 - protein, 8 aa, Homo sapiens
MLELVAQK

SEQ ID NO: 10413 - protein, 29 aa, Homo sapiens
EPTSSEQGGLEGSGSAAGEGKPALSEEER

SEQ ID NO: 10414 - protein, 16 aa, Homo sapiens
AELTALESLIEMGFPR

SEQ ID NO: 10415 - protein, 19 aa, Homo sapiens
GEELGGGQDPVQLLSGFPR

SEQ ID NO: 10416 - protein, 12 aa, Homo sapiens
LPDGTSLTQTFR

SEQ ID NO: 10417 - protein, 10 aa, Homo sapiens
RQGQELSAAR

SEQ ID NO: 10418 - protein, 8 aa, Homo sapiens
LKEEMLGK

SEQ ID NO: 10419 - protein, 9 aa, Homo sapiens
EMAINDCSK

SEQ ID NO: 10420 - protein, 20 aa, Homo sapiens
DLGNLVLRPFGLSTENFQIK

SEQ ID NO: 10421 - protein, 11 aa, Homo sapiens
ALEMCPSCFQK

SEQ ID NO: 10422 - protein, 18 aa, Homo sapiens
VTDTQEAECAGPPVPDPK

SEQ ID NO: 10423 - protein, 12 aa, Homo sapiens
TDKLDEALEDYK

SEQ ID NO: 10424 - protein, 13 aa, Homo sapiens
KGDYIEAESSYSR

SEQ ID NO: 10425 - protein, 13 aa, Homo sapiens
SILEKDPSIHQAR

SEQ ID NO: 10426 - protein, 20 aa, Homo sapiens
SNEDVNSSELDEEYLIELEK

SEQ ID NO: 10427 - protein, 10 aa, Homo sapiens
AIQLNPSYIR

SEQ ID NO: 10428 - protein, 12 aa, Homo sapiens
GDYIEAESSYSR

SEQ ID NO: 10429 - protein, 20 aa, Homo sapiens
QDSSTGSYSINFVQNPNNNR

SEQ ID NO: 10430 - protein, 7 aa, Homo sapiens
SILFSNR

SEQ ID NO: 10431 - protein, 34 aa, Homo sapiens
GHDQSAYDGKDYIALNEDLSSWTAADTAAQITQR

SEQ ID NO: 10432 - protein, 14 aa, Homo sapiens
FISVGYVDGTQFVR

SEQ ID NO: 10433 - protein, 8 aa, Homo sapiens
YFHTSVSR

SEQ ID NO: 10434 - protein, 26 aa, Homo sapiens
VTIAQGGVLPNIQAVLLPKKTESHHK

SEQ ID NO: 10435 - protein, 7 aa, Homo sapiens
KTESHHK

SEQ ID NO: 10436 - protein, 20 aa, Homo sapiens
VTIAQGGVLPNIQAVLLPKK

SEQ ID NO: 10437 - protein, 18 aa, Homo sapiens
HLQLAIRNDEELNKLLGK

SEQ ID NO: 10438 - protein, 14 aa, Homo sapiens
HLQLAIRNDEELNK

SEQ ID NO: 10439 - protein, 30 aa, Homo sapiens
NDEELNKLLGKVTIAQGGVLPNIQAVLLPK

SEQ ID NO: 10440 - protein, 11 aa, Homo sapiens
NDEELNKLLGK

SEQ ID NO: 10441 - protein, 7 aa, Homo sapiens
NDEELNK

SEQ ID NO: 10442 - protein, 19 aa, Homo sapiens
VTIAQGGVLPNIQAVLLPK

SEQ ID NO: 10443 - protein, 9 aa, Homo sapiens
AGLQFPVGR

SEQ ID NO: 10444 - protein, 7 aa, Homo sapiens
HLQLAIR

SEQ ID NO: 10445 - protein, 7 aa, Homo sapiens
KGNYAER

SEQ ID NO: 10446 - protein, 29 aa, Homo sapiens
VGAGAPVYMAAVLEYLTAEILELAGNAAR

SEQ ID NO: 10447 - protein, 17 aa, Homo sapiens
GADSGEEKEEGINREDK

SEQ ID NO: 10448 - protein, 10 aa, Homo sapiens
IDVLDPEELK

SEQ ID NO: 10449 - protein, 15 aa, Homo sapiens
IDVLDPEELKSESAK

SEQ ID NO: 10450 - protein, 11 aa, Homo sapiens
LISSVDPQFLK

SEQ ID NO: 10451 - protein, 10 aa, Homo sapiens
AMQHAEVYYK

SEQ ID NO: 10452 - protein, 17 aa, Homo sapiens
LDCSQGYTEENTIFAPR

SEQ ID NO: 10453 - protein, 10 aa, Homo sapiens
VDDQIYSEFR

SEQ ID NO: 10454 - protein, 12 aa, Homo sapiens
KYAVLYQPLFDK

SEQ ID NO: 10455 - protein, 13 aa, Homo sapiens
KYAVLYQPLFDKR

SEQ ID NO: 10456 - protein, 27 aa, Homo sapiens
SEPDDSDPFSFDGPEIMGCTGCQIDWK

SEQ ID NO: 10457 - protein, 18 aa, Homo sapiens
NVDLLSDMVQEHDEPILK

SEQ ID NO: 10458 - protein, 12 aa, Homo sapiens
YAVLYQPLFDKR

SEQ ID NO: 10459 - protein, 31 aa, Homo sapiens
ADIDNKEQSELDQDLDDVEEVEEEETGEETK

SEQ ID NO: 10460 - protein, 11 aa, Homo sapiens
GIPEFWLTVFK

SEQ ID NO: 10461 - protein, 11 aa, Homo sapiens
YAVLYQPLFDK

SEQ ID NO: 10462 - protein, 17 aa, Homo sapiens
LDGLVETPTGYIESLPR

SEQ ID NO: 10463 - protein, 19 aa, Homo sapiens
QLTVQMMQNPQILAALQER

SEQ ID NO: 10464 - protein, 19 aa, Homo sapiens
AMLEAQQEALEELQLESPK

SEQ ID NO: 10465 - protein, 8 aa, Homo sapiens
LHAEAIKR

SEQ ID NO: 10466 - protein, 7 aa, Homo sapiens
LHAEAIK

SEQ ID NO: 10467 - protein, 9 aa, Homo sapiens
DPNLFPFEK

SEQ ID NO: 10468 - protein, 16 aa, Homo sapiens
ATQELIPIEDFITPLK

SEQ ID NO: 10469 - protein, 8 aa, Homo sapiens
VYTQVEFK

SEQ ID NO: 10470 - protein, 10 aa, Homo sapiens
RDPNLFPFEK

SEQ ID NO: 10471 - protein, 9 aa, Homo sapiens
VYTQVEFKR

SEQ ID NO: 10472 - protein, 18 aa, Homo sapiens
EGPHYTPPIPNYQPPEGR

SEQ ID NO: 10473 - protein, 14 aa, Homo sapiens
ERPQVELTFEETER

SEQ ID NO: 10474 - protein, 15 aa, Homo sapiens
ERPQVELTFEETERR

SEQ ID NO: 10475 - protein, 12 aa, Homo sapiens
TWPSSHNWFFAK

SEQ ID NO: 10476 - protein, 21 aa, Homo sapiens
FVTHVSDWGALATISTLEAVR

SEQ ID NO: 10477 - protein, 12 aa, Homo sapiens
LPPLPPREDAAR

SEQ ID NO: 10478 - protein, 10 aa, Homo sapiens
DKVVDLLYWR

SEQ ID NO: 10479 - protein, 14 aa, Homo sapiens
YSNSALGHVNCTIK

SEQ ID NO: 10480 - protein, 14 aa, Homo sapiens
HQAQIDHYLGLANK

SEQ ID NO: 10481 - protein, 8 aa, Homo sapiens
GVIQAIQK

SEQ ID NO: 10482 - protein, 8 aa, Homo sapiens
SDEGHPFR

SEQ ID NO: 10483 - protein, 8 aa, Homo sapiens
VVDLLYWR

SEQ ID NO: 10484 - protein, 11 aa, Homo sapiens
TPDEKKDEIEK

SEQ ID NO: 10485 - protein, 22 aa, Homo sapiens
KNVEPFTSVLSLPYPFASEINK

SEQ ID NO: 10486 - protein, 12 aa, Homo sapiens
VDEERENFLQTK

SEQ ID NO: 10487 - protein, 16 aa, Homo sapiens
AYPYMEGEPEDDVYLK

SEQ ID NO: 10488 - protein, 21 aa, Homo sapiens
NVEPFTSVLSLPYPFASEINK

SEQ ID NO: 10489 - protein, 17 aa, Homo sapiens
AYPYMEGEPEDDVYLKR

SEQ ID NO: 10490 - protein, 7 aa, Homo sapiens
IDPLLPK

SEQ ID NO: 10491 - protein, 11 aa, Homo sapiens
KFQILDFTSPK

SEQ ID NO: 10492 - protein, 10 aa, Homo sapiens
FQILDFTSPK

SEQ ID NO: 10493 - protein, 10 aa, Homo sapiens
SSTSEGLLLK

SEQ ID NO: 10494 - protein, 18 aa, Homo sapiens
IAEENGAAFAGGTSLIQK

SEQ ID NO: 10495 - protein, 12 aa, Homo sapiens
VAVFTENASEVK

SEQ ID NO: 10496 - protein, 12 aa, Homo sapiens
HRPLNLGPFVVR

SEQ ID NO: 10497 - protein, 10 aa, Homo sapiens
GQGPGEVDPK

SEQ ID NO: 10498 - protein, 10 aa, Homo sapiens
DSFPNFLACK

SEQ ID NO: 10499 - protein, 15 aa, Homo sapiens
EMVATQQEMMDAQLR

SEQ ID NO: 10500 - protein, 8 aa, Homo sapiens
TEAKPVDK

SEQ ID NO: 10501 - protein, 14 aa, Homo sapiens
YGSGVSGIPYGQPK

SEQ ID NO: 10502 - protein, 14 aa, Homo sapiens
AGCQVASTMLVWSK

SEQ ID NO: 10503 - protein, 10 aa, Homo sapiens
DDGVSWSTPR

SEQ ID NO: 10504 - protein, 16 aa, Homo sapiens
DGVFCLLSDDHGASWR

SEQ ID NO: 10505 - protein, 10 aa, Homo sapiens
GTLLAFAEAR

SEQ ID NO: 10506 - protein, 11 aa, Homo sapiens
LIVCGHGTLER

SEQ ID NO: 10507 - protein, 11 aa, Homo sapiens
SYDACDTLRPR

SEQ ID NO: 10508 - protein, 9 aa, Homo sapiens
TNLEEFASK

SEQ ID NO: 10509 - protein, 8 aa, Homo sapiens
QVLEHLLK

SEQ ID NO: 10510 - protein, 12 aa, Homo sapiens
FAQDVSQDDLIR

SEQ ID NO: 10511 - protein, 15 aa, Homo sapiens
RLQEAQLYKEEGNQR

SEQ ID NO: 10512 - protein, 8 aa, Homo sapiens
LQEAQLYK

SEQ ID NO: 10513 - protein, 14 aa, Homo sapiens
LQEAQLYKEEGNQR

SEQ ID NO: 10514 - protein, 15 aa, Homo sapiens
AGVAFFHLQDYDQAR

SEQ ID NO: 10515 - protein, 9 aa, Homo sapiens
HYLLAAVNR

SEQ ID NO: 10516 - protein, 14 aa, Homo sapiens
YLQLTQSELSSYHR

SEQ ID NO: 10517 - protein, 18 aa, Homo sapiens
WLHSMTDDPPTTKPLTAR

SEQ ID NO: 10518 - protein, 9 aa, Homo sapiens
MELVQVLKR

SEQ ID NO: 10519 - protein, 8 aa, Homo sapiens
MELVQVLK

SEQ ID NO: 10520 - protein, 17 aa, Homo sapiens
FNVTGTPEQYVPYSTTR

SEQ ID NO: 10521 - protein, 12 aa, Homo sapiens
GLQQITGHGGLR

SEQ ID NO: 10522 - protein, 19 aa, Homo sapiens
SIQETLGESGSLLPNKLNK

SEQ ID NO: 10523 - protein, 16 aa, Homo sapiens
SIQETLGESGSLLPNK

SEQ ID NO: 10524 - protein, 11 aa, Homo sapiens
EIQGFLDCAAR

SEQ ID NO: 10525 - protein, 13 aa, Homo sapiens
EDEVQAIATLIEK

SEQ ID NO: 10526 - protein, 16 aa, Homo sapiens
VKKEDEVQAIATLIEK

SEQ ID NO: 10527 - protein, 10 aa, Homo sapiens
WSETQNVVTK

SEQ ID NO: 10528 - protein, 28 aa, Homo sapiens
AAPSEVAAIAPGEGDGGGGGFGSWLDGR

SEQ ID NO: 10529 - protein, 8 aa, Homo sapiens
LEALGVDR

SEQ ID NO: 10530 - protein, 11 aa, Homo sapiens
NTNVEDVLNAR

SEQ ID NO: 10531 - protein, 10 aa, Homo sapiens
TKDIEDVFYK

SEQ ID NO: 10532 - protein, 8 aa, Homo sapiens
DIEDVFYK

SEQ ID NO: 10533 - protein, 16 aa, Homo sapiens
VVVSGLPPSGSWQDLK

SEQ ID NO: 10534 - protein, 9 aa, Homo sapiens
KEDMTYAVR

SEQ ID NO: 10535 - protein, 9 aa, Homo sapiens
DAEDAVYGR

SEQ ID NO: 10536 - protein, 18 aa, Homo sapiens
DAEDAVYGRDGYDYDGYR

SEQ ID NO: 10537 - protein, 10 aa, Homo sapiens
DGTGVVEFVR

SEQ ID NO: 10538 - protein, 9 aa, Homo sapiens
DGYDYDGYR

SEQ ID NO: 10539 - protein, 12 aa, Homo sapiens
EAGDVCYADVYR

SEQ ID NO: 10540 - protein, 14 aa, Homo sapiens
GGPPFAFVEFEDPR

SEQ ID NO: 10541 - protein, 23 aa, Homo sapiens
GGPPFAFVEFEDPRDAEDAVYGR

SEQ ID NO: 10542 - protein, 11 aa, Homo sapiens
IYVGNLPPDIR

SEQ ID NO: 10543 - protein, 7 aa, Homo sapiens
LRVEFPR

SEQ ID NO: 10544 - protein, 15 aa, Homo sapiens
RGGPPFAFVEFEDPR

SEQ ID NO: 10545 - protein, 10 aa, Homo sapiens
SHEGETAYIR

SEQ ID NO: 10546 - protein, 17 aa, Homo sapiens
AAYLQETGKPLDETLKK

SEQ ID NO: 10547 - protein, 24 aa, Homo sapiens
GGPGSAVSPYPTFNPSSDVAALHK

SEQ ID NO: 10548 - protein, 13 aa, Homo sapiens
GVDEATIIDILTK

SEQ ID NO: 10549 - protein, 8 aa, Homo sapiens
AMVSEFLK

SEQ ID NO: 10550 - protein, 11 aa, Homo sapiens
DITSDTSGDFR

SEQ ID NO: 10551 - protein, 14 aa, Homo sapiens
GTDVNVFNTILTTR

SEQ ID NO: 10552 - protein, 11 aa, Homo sapiens
TPAQFDADELR

SEQ ID NO: 10553 - protein, 7 aa, Homo sapiens
FGDVSVK

SEQ ID NO: 10554 - protein, 22 aa, Homo sapiens
ISELGSQLSDEAVEDGLFHEFK

SEQ ID NO: 10555 - protein, 12 aa, Homo sapiens
EVDEISPEDDQR

SEQ ID NO: 10556 - protein, 11 aa, Homo sapiens
LPPPPPPPLPR

SEQ ID NO: 10557 - protein, 8 aa, Homo sapiens
LQQLALGR

SEQ ID NO: 10558 - protein, 19 aa, Homo sapiens
SSSSSAASDTATSTQRPLR

SEQ ID NO: 10559 - protein, 7 aa, Homo sapiens
VAFVNFR

SEQ ID NO: 10560 - protein, 20 aa, Homo sapiens
VAGPNGYAILLAVPGSSDSR

SEQ ID NO: 10561 - protein, 24 aa, Homo sapiens
YQQQYLQPLPLTHYELVTDAFGHR

SEQ ID NO: 10562 - protein, 12 aa, Homo sapiens
YLQTLTTIAAEK

SEQ ID NO: 10563 - protein, 14 aa, Homo sapiens
TISFDIPPQEILTK

SEQ ID NO: 10564 - protein, 16 aa, Homo sapiens
EASMVITESPAALQLR

SEQ ID NO: 10565 - protein, 8 aa, Homo sapiens
LLAQTTLR

SEQ ID NO: 10566 - protein, 12 aa, Homo sapiens
VIAAEGEMNASR

SEQ ID NO: 10567 - protein, 15 aa, Homo sapiens
AMLGQFSQAEALLMK

SEQ ID NO: 10568 - protein, 17 aa, Homo sapiens
TSQLGSDHENTEEVSMR

SEQ ID NO: 10569 - protein, 14 aa, Homo sapiens
VLSPQDQDVQDNPR

SEQ ID NO: 10570 - protein, 13 aa, Homo sapiens
KIIPTLEEYQHYK

SEQ ID NO: 10571 - protein, 12 aa, Homo sapiens
IILDLISESPIK

SEQ ID NO: 10572 - protein, 10 aa, Homo sapiens
VVLIGGKPDR

SEQ ID NO: 10573 - protein, 12 aa, Homo sapiens
IIPTLEEYQHYK

SEQ ID NO: 10574 - protein, 15 aa, Homo sapiens
LLIHQSLAGGIIGVK

SEQ ID NO: 10575 - protein, 14 aa, Homo sapiens
RPAEDMEEEQAFKR

SEQ ID NO: 10576 - protein, 13 aa, Homo sapiens
RPAEDMEEEQAFK

SEQ ID NO: 10577 - protein, 23 aa, Homo sapiens
IITITGTQDQIQNAQYLLQNSVK

SEQ ID NO: 10578 - protein, 19 aa, Homo sapiens
GSYGDLGGPIITTQVTIPK

SEQ ID NO: 10579 - protein, 9 aa, Homo sapiens
DLAGSIIGK

SEQ ID NO: 10580 - protein, 8 aa, Homo sapiens
DYDDMSPR

SEQ ID NO: 10581 - protein, 9 aa, Homo sapiens
GGDLMAYDR

SEQ ID NO: 10582 - protein, 10 aa, Homo sapiens
GGDLMAYDRR

SEQ ID NO: 10583 - protein, 9 aa, Homo sapiens
GSDFDCELR

SEQ ID NO: 10584 - protein, 11 aa, Homo sapiens
IDEPLEGSEDR

SEQ ID NO: 10585 - protein, 12 aa, Homo sapiens
LFQECCPHSTDR

SEQ ID NO: 10586 - protein, 11 aa, Homo sapiens
NLPLPPPPPPR

SEQ ID NO: 10587 - protein, 9 aa, Homo sapiens
NTDEMVELR

SEQ ID NO: 10588 - protein, 17 aa, Homo sapiens
TDYNASVSVPDSSGPER

SEQ ID NO: 10589 - protein, 14 aa, Homo sapiens
FLEFGPENCTSWIK

SEQ ID NO: 10590 - protein, 10 aa, Homo sapiens
FEENQKEFER

SEQ ID NO: 10591 - protein, 14 aa, Homo sapiens
SFEEEFGTASDKER

SEQ ID NO: 10592 - protein, 11 aa, Homo sapiens
AIYELAISQPR

SEQ ID NO: 10593 - protein, 14 aa, Homo sapiens
ANPHNYDAWFDYLR

SEQ ID NO: 10594 - protein, 13 aa, Homo sapiens
FAELETILGDIDR

SEQ ID NO: 10595 - protein, 12 aa, Homo sapiens
LVESDAEAEAVR

SEQ ID NO: 10596 - protein, 13 aa, Homo sapiens
HRPEDVVQFLVSK

SEQ ID NO: 10597 - protein, 11 aa, Homo sapiens
KYSEIEEFYQK

SEQ ID NO: 10598 - protein, 16 aa, Homo sapiens
VEEDLDQILNLGAEPK

SEQ ID NO: 10599 - protein, 8 aa, Homo sapiens
AVFNEILR

SEQ ID NO: 10600 - protein, 17 aa, Homo sapiens
DAELAGSPELLEFLGTR

SEQ ID NO: 10601 - protein, 19 aa, Homo sapiens
LTIFDEEVDPDEGLFGPGR

SEQ ID NO: 10602 - protein, 20 aa, Homo sapiens
RLQNAHTGLDLTVPQHQEVR

SEQ ID NO: 10603 - protein, 11 aa, Homo sapiens
YAAASLPPLPR

SEQ ID NO: 10604 - protein, 16 aa, Homo sapiens
DLLDDLKSELTGKFEK

SEQ ID NO: 10605 - protein, 12 aa, Homo sapiens
KNFATSLYSMIK

SEQ ID NO: 10606 - protein, 15 aa, Homo sapiens
WGTDEEKFITIFGTR

SEQ ID NO: 10607 - protein, 7 aa, Homo sapiens
LIVALMK

SEQ ID NO: 10608 - protein, 8 aa, Homo sapiens
QEISAAFK

SEQ ID NO: 10609 - protein, 7 aa, Homo sapiens
WGTDEEK

SEQ ID NO: 10610 - protein, 15 aa, Homo sapiens
SIPAYLAETLYYAMK

SEQ ID NO: 10611 - protein, 8 aa, Homo sapiens
LYDAYELK

SEQ ID NO: 10612 - protein, 7 aa, Homo sapiens
DLLDDLK

SEQ ID NO: 10613 - protein, 11 aa, Homo sapiens
NFATSLYSMIK

SEQ ID NO: 10614 - protein, 10 aa, Homo sapiens
LIVALMKPSR

SEQ ID NO: 10615 - protein, 15 aa, Homo sapiens
ETSGNLEQLLLAVVK

SEQ ID NO: 10616 - protein, 25 aa, Homo sapiens
DPDAGIDEAQVEQDAQALFQAGELK

SEQ ID NO: 10617 - protein, 13 aa, Homo sapiens
DLLDDLKSELTGK

SEQ ID NO: 10618 - protein, 9 aa, Homo sapiens
SELTGKFEK

SEQ ID NO: 10619 - protein, 7 aa, Homo sapiens
ADAETLR

SEQ ID NO: 10620 - protein, 10 aa, Homo sapiens
ALLLLCGEDD

SEQ ID NO: 10621 - protein, 8 aa, Homo sapiens
FITIFGTR

SEQ ID NO: 10622 - protein, 11 aa, Homo sapiens
GAGTDDHTLIR

SEQ ID NO: 10623 - protein, 16 aa, Homo sapiens
GLGTDEESILTLLTSR

SEQ ID NO: 10624 - protein, 12 aa, Homo sapiens
GTVTDFPGFDER

SEQ ID NO: 10625 - protein, 10 aa, Homo sapiens
MLVVLLQANR

SEQ ID NO: 10626 - protein, 25 aa, Homo sapiens
QVYEEEYGSSLEDDVVGDTSGYYQR

SEQ ID NO: 10627 - protein, 9 aa, Homo sapiens
SEIDLFNIR

SEQ ID NO: 10628 - protein, 9 aa, Homo sapiens
VLTEIIASR

SEQ ID NO: 10629 - protein, 15 aa, Homo sapiens
YMTISGFQIEETIDR

SEQ ID NO: 10630 - protein, 10 aa, Homo sapiens
LAGDHIEYYK

SEQ ID NO: 10631 - protein, 10 aa, Homo sapiens
ASSEMALYQK

SEQ ID NO: 10632 - protein, 9 aa, Homo sapiens
EGFLESFKK

SEQ ID NO: 10633 - protein, 8 aa, Homo sapiens
EGFLESFK

SEQ ID NO: 10634 - protein, 11 aa, Homo sapiens
VVHDLDKLPPR

SEQ ID NO: 10635 - protein, 12 aa, Homo sapiens
CLIFPLIVTGQR

SEQ ID NO: 10636 - protein, 8 aa, Homo sapiens
NQLELAAR

SEQ ID NO: 10637 - protein, 10 aa, Homo sapiens
PIFGLTSNYK

SEQ ID NO: 10638 - protein, 19 aa, Homo sapiens
DGGTFISDADDVVSAMIVK

SEQ ID NO: 10639 - protein, 14 aa, Homo sapiens
ILQELPSVSQETLK

SEQ ID NO: 10640 - protein, 9 aa, Homo sapiens
MNEAAEEDR

SEQ ID NO: 10641 - protein, 8 aa, Homo sapiens
FLDASGAK

SEQ ID NO: 10642 - protein, 8 aa, Homo sapiens
SVFLEQMK

SEQ ID NO: 10643 - protein, 11 aa, Homo sapiens
AEVLSEEPILK

SEQ ID NO: 10644 - protein, 12 aa, Homo sapiens
GDPFKDIILYVK

SEQ ID NO: 10645 - protein, 8 aa, Homo sapiens
YFTEAGLK

SEQ ID NO: 10646 - protein, 8 aa, Homo sapiens
GFEDEVKK

SEQ ID NO: 10647 - protein, 13 aa, Homo sapiens
IQEYCYDNIHFMK

SEQ ID NO: 10648 - protein, 10 aa, Homo sapiens
DINAVAASLR

SEQ ID NO: 10649 - protein, 8 aa, Homo sapiens
ELQEQMSR

SEQ ID NO: 10650 - protein, 13 aa, Homo sapiens
HLREEEEEGEKHR

SEQ ID NO: 10651 - protein, 12 aa, Homo sapiens
NYVPEDEDLKKR

SEQ ID NO: 10652 - protein, 10 aa, Homo sapiens
NYVPEDEDLK

SEQ ID NO: 10653 - protein, 19 aa, Homo sapiens
LKGQEDSLASAVDAATEQK

SEQ ID NO: 10654 - protein, 13 aa, Homo sapiens
RVPQAKPVAVEEK

SEQ ID NO: 10655 - protein, 17 aa, Homo sapiens
GQEDSLASAVDAATEQK

SEQ ID NO: 10656 - protein, 25 aa, Homo sapiens
VKEQLEAAKPEPVIEEVDLANLAPR

SEQ ID NO: 10657 - protein, 7 aa, Homo sapiens
AIAELIR

SEQ ID NO: 10658 - protein, 10 aa, Homo sapiens
MEATTAGVGR

SEQ ID NO: 10659 - protein, 7 aa, Homo sapiens
KLNLAFR

SEQ ID NO: 10660 - protein, 15 aa, Homo sapiens
SAHLTNPWNEHKPVK

SEQ ID NO: 10661 - protein, 11 aa, Homo sapiens
GVWSTLPVNEK

SEQ ID NO: 10662 - protein, 10 aa, Homo sapiens
IDYPPEFHQR

SEQ ID NO: 10663 - protein, 7 aa, Homo sapiens
VHDYDMR

SEQ ID NO: 10664 - protein, 7 aa, Homo sapiens
YVLQDAR

SEQ ID NO: 10665 - protein, 14 aa, Homo sapiens
LDFSITKDPAAEAR

SEQ ID NO: 10666 - protein, 9 aa, Homo sapiens
LAHLGVQVK

SEQ ID NO: 10667 - protein, 10 aa, Homo sapiens
TVDLSSHLAK

SEQ ID NO: 10668 - protein, 17 aa, Homo sapiens
FVDHVFDEQVIDSLTVK

SEQ ID NO: 10669 - protein, 8 aa, Homo sapiens
FPLFGGWK

SEQ ID NO: 10670 - protein, 15 aa, Homo sapiens
VACITEQVLTLVNKR

SEQ ID NO: 10671 - protein, 18 aa, Homo sapiens
QFVVFEGNHYFYSPYPTK

SEQ ID NO: 10672 - protein, 14 aa, Homo sapiens
VACITEQVLTLVNK

SEQ ID NO: 10673 - protein, 11 aa, Homo sapiens
LKTEGSDLCDR

SEQ ID NO: 10674 - protein, 10 aa, Homo sapiens
LPVALDPGAK

SEQ ID NO: 10675 - protein, 11 aa, Homo sapiens
DVPAYSQDTFK

SEQ ID NO: 10676 - protein, 8 aa, Homo sapiens
DTYIENEK

SEQ ID NO: 10677 - protein, 25 aa, Homo sapiens
THYIVGYNLPSYEYLYNLGDQYALK

SEQ ID NO: 10678 - protein, 22 aa, Homo sapiens
APDELHYTYLDTFGRPVIVAYK

SEQ ID NO: 10679 - protein, 25 aa, Homo sapiens
ISVIVETVYTHVLHPYPTQITQSEK

SEQ ID NO: 10680 - protein, 18 aa, Homo sapiens
NLVEQHIQDIVVHYTFNK

SEQ ID NO: 10681 - protein, 12 aa, Homo sapiens
ALTSEIALLQSR

SEQ ID NO: 10682 - protein, 15 aa, Homo sapiens
APDELHYTYLDTFGR

SEQ ID NO: 10683 - protein, 15 aa, Homo sapiens
ATSFLLALEPELEAR

SEQ ID NO: 10684 - protein, 12 aa, Homo sapiens
GEDEEENNLEVR

SEQ ID NO: 10685 - protein, 8 aa, Homo sapiens
HFDETVNR

SEQ ID NO: 10686 - protein, 8 aa, Homo sapiens
IDHILDAL

SEQ ID NO: 10687 - protein, 12 aa, Homo sapiens
NIEIDSPYEISR

SEQ ID NO: 10688 - protein, 11 aa, Homo sapiens
SEDLLDYGPFR

SEQ ID NO: 10689 - protein, 13 aa, Homo sapiens
TILPAAAQDVYYR

SEQ ID NO: 10690 - protein, 17 aa, Homo sapiens
VHYENNSPFLTITSMTR

SEQ ID NO: 10691 - protein, 17 aa, Homo sapiens
VTAEVVLAHLGGGSTSR

SEQ ID NO: 10692 - protein, 24 aa, Homo sapiens
LAENSASSDDLLVAEVGISDYGDK

SEQ ID NO: 10693 - protein, 7 aa, Homo sapiens
WAEQYLK

SEQ ID NO: 10694 - protein, 32 aa, Homo sapiens
LAENSASSDDLLVAEVGISDYGDKLNMELSEK

SEQ ID NO: 10695 - protein, 10 aa, Homo sapiens
FDTQYPYGEK

SEQ ID NO: 10696 - protein, 10 aa, Homo sapiens
SLNILTAFQK

SEQ ID NO: 10697 - protein, 16 aa, Homo sapiens
FDTQYPYGEKQDEFKR

SEQ ID NO: 10698 - protein, 15 aa, Homo sapiens
DGDFENPVPYTGAVK

SEQ ID NO: 10699 - protein, 15 aa, Homo sapiens
FDTQYPYGEKQDEFK

SEQ ID NO: 10700 - protein, 12 aa, Homo sapiens
GALPLDTVTFYK

SEQ ID NO: 10701 - protein, 8 aa, Homo sapiens
LNMELSEK

SEQ ID NO: 10702 - protein, 10 aa, Homo sapiens
QGQDNLSSVK

SEQ ID NO: 10703 - protein, 13 aa, Homo sapiens
LDKESYPVFYLFR

SEQ ID NO: 10704 - protein, 10 aa, Homo sapiens
ESYPVFYLFR

SEQ ID NO: 10705 - protein, 24 aa, Homo sapiens
GQGVYLGMPGCLPVYDALAGEFIR

SEQ ID NO: 10706 - protein, 15 aa, Homo sapiens
ILDQGEDFPASEMTR

SEQ ID NO: 10707 - protein, 17 aa, Homo sapiens
VCSEVLQMEPDNVNALK

SEQ ID NO: 10708 - protein, 10 aa, Homo sapiens
LDEAEDDFKK

SEQ ID NO: 10709 - protein, 11 aa, Homo sapiens
LKNDNTEAFYK

SEQ ID NO: 10710 - protein, 21 aa, Homo sapiens
SQALNAFGSGDYTAAIAFLDK

SEQ ID NO: 10711 - protein, 17 aa, Homo sapiens
SNPSENEEKEAQSQLIK

SEQ ID NO: 10712 - protein, 16 aa, Homo sapiens
LALQWHPDNFQNEEEK

SEQ ID NO: 10713 - protein, 8 aa, Homo sapiens
AALPDLTK

SEQ ID NO: 10714 - protein, 24 aa, Homo sapiens
KFDDGEDPLDAESQQGGGGNPFHR

SEQ ID NO: 10715 - protein, 9 aa, Homo sapiens
EVLSDPEMR

SEQ ID NO: 10716 - protein, 19 aa, Homo sapiens
ISTLYYQLGDHELSLSEVR

SEQ ID NO: 10717 - protein, 7 aa, Homo sapiens
MDFTAAR

SEQ ID NO: 10718 - protein, 18 aa, Homo sapiens
SWNSWQGFNPFSSGGPFR

SEQ ID NO: 10719 - protein, 12 aa, Homo sapiens
YAALYQPLFDKR

SEQ ID NO: 10720 - protein, 11 aa, Homo sapiens
YAALYQPLFDK

SEQ ID NO: 10721 - protein, 13 aa, Homo sapiens
KYAALYQPLFDKR

SEQ ID NO: 10722 - protein, 18 aa, Homo sapiens
ADHSFSDGVPSDSVEAAK

SEQ ID NO: 10723 - protein, 15 aa, Homo sapiens
QVPNESFFNFFNPLK

SEQ ID NO: 10724 - protein, 12 aa, Homo sapiens
KYAALYQPLFDK

SEQ ID NO: 10725 - protein, 17 aa, Homo sapiens
LDNVPHTPSSYIETLPK

SEQ ID NO: 10726 - protein, 18 aa, Homo sapiens
NVDMLSELVQEYDEPILK

SEQ ID NO: 10727 - protein, 11 aa, Homo sapiens
AAATAEEPDPK

SEQ ID NO: 10728 - protein, 27 aa, Homo sapiens
ASGDGESLDEDSEFTLASDFEIGHFFR

SEQ ID NO: 10729 - protein, 10 aa, Homo sapiens
FYEEVHDLER

SEQ ID NO: 10730 - protein, 11 aa, Homo sapiens
GIPEFWFTIFR

SEQ ID NO: 10731 - protein, 10 aa, Homo sapiens
LTDQVMQNPR

SEQ ID NO: 10732 - protein, 8 aa, Homo sapiens
VLAALQER

SEQ ID NO: 10733 - protein, 24 aa, Homo sapiens
ENDMSPSNNVVPIHVPPTTENKPK

SEQ ID NO: 10734 - protein, 11 aa, Homo sapiens
YKEETIEKMQE

SEQ ID NO: 10735 - protein, 7 aa, Homo sapiens
LKLDKDR

SEQ ID NO: 10736 - protein, 9 aa, Homo sapiens
KIMSSPLSK

SEQ ID NO: 10737 - protein, 16 aa, Homo sapiens
EKANGTTVHVGIHPSK

SEQ ID NO: 10738 - protein, 10 aa, Homo sapiens
GKYKEETIEK

SEQ ID NO: 10739 - protein, 8 aa, Homo sapiens
YKEETIEK

SEQ ID NO: 10740 - protein, 14 aa, Homo sapiens
ANGTTVHVGIHPSK

SEQ ID NO: 10741 - protein, 11 aa, Homo sapiens
MKFNPFVTSDR

SEQ ID NO: 10742 - protein, 8 aa, Homo sapiens
KYVIYIER

SEQ ID NO: 10743 - protein, 8 aa, Homo sapiens
IMSSPLSK

SEQ ID NO: 10744 - protein, 9 aa, Homo sapiens
KDDEVQVVR

SEQ ID NO: 10745 - protein, 8 aa, Homo sapiens
DDEVQVVR

SEQ ID NO: 10746 - protein, 9 aa, Homo sapiens
FNPFVTSDR

SEQ ID NO: 10747 - protein, 9 aa, Homo sapiens
HFNAPSHIR

SEQ ID NO: 10748 - protein, 10 aa, Homo sapiens
RHFNAPSHIR

SEQ ID NO: 10749 - protein, 7 aa, Homo sapiens
YVIYIER

SEQ ID NO: 10750 - protein, 16 aa, Homo sapiens
AGYEYVSPEQLAGFDK

SEQ ID NO: 10751 - protein, 8 aa, Homo sapiens
LTDTLVSK

SEQ ID NO: 10752 - protein, 16 aa, Homo sapiens
QNDQVSFASLVEELKK

SEQ ID NO: 10753 - protein, 12 aa, Homo sapiens
SVEELLEAELLK

SEQ ID NO: 10754 - protein, 12 aa, Homo sapiens
SVLAETEGILQK

SEQ ID NO: 10755 - protein, 11 aa, Homo sapiens
AQQSLELIQSK

SEQ ID NO: 10756 - protein, 9 aa, Homo sapiens
VQELQNLLK

SEQ ID NO: 10757 - protein, 13 aa, Homo sapiens
LLEEQLQHEISNK

SEQ ID NO: 10758 - protein, 10 aa, Homo sapiens
NAEQAATQLK

SEQ ID NO: 10759 - protein, 17 aa, Homo sapiens
LQALANEQAAAAHELEK

SEQ ID NO: 10760 - protein, 16 aa, Homo sapiens
EVIDLLKPDQVEGIQK

SEQ ID NO: 10761 - protein, 13 aa, Homo sapiens
DAVSNTTNQLESK

SEQ ID NO: 10762 - protein, 18 aa, Homo sapiens
VSVPSNLSYGEWLHGFEK

SEQ ID NO: 10763 - protein, 10 aa, Homo sapiens
SVEQEENKWK

SEQ ID NO: 10764 - protein, 13 aa, Homo sapiens
WLQDLQEENESLK

SEQ ID NO: 10765 - protein, 8 aa, Homo sapiens
LQQEEVQK

SEQ ID NO: 10766 - protein, 12 aa, Homo sapiens
TQLLQDVQDENK

SEQ ID NO: 10767 - protein, 25 aa, Homo sapiens
AQIQQFHSQIAAQTSASVLAEELHK

SEQ ID NO: 10768 - protein, 13 aa, Homo sapiens
LKTETDKENAEVK

SEQ ID NO: 10769 - protein, 15 aa, Homo sapiens
QMQSSFTSSEQELER

SEQ ID NO: 10770 - protein, 10 aa, Homo sapiens
QTEDSLASER

SEQ ID NO: 10771 - protein, 8 aa, Homo sapiens
STYVTEVR

SEQ ID NO: 10772 - protein, 14 aa, Homo sapiens
TAEHEAAQQDLQSK

SEQ ID NO: 10773 - protein, 8 aa, Homo sapiens
VQLQEAER

SEQ ID NO: 10774 - protein, 9 aa, Homo sapiens
WEEVQSYIR

SEQ ID NO: 10775 - protein, 12 aa, Homo sapiens
KYPDRVPVIVEK

SEQ ID NO: 10776 - protein, 7 aa, Homo sapiens
VPVIVEK

SEQ ID NO: 10777 - protein, 11 aa, Homo sapiens
FVYKEEHPFEK

SEQ ID NO: 10778 - protein, 17 aa, Homo sapiens
YLVPSDLTVGQFYFLIR

SEQ ID NO: 10779 - protein, 14 aa, Homo sapiens
GFCYVEFDEVDSLK

SEQ ID NO: 10780 - protein, 29 aa, Homo sapiens
ELPTEPPYTAYVGNLPFNTVQGDIDAIFK

SEQ ID NO: 10781 - protein, 9 aa, Homo sapiens
ADFDTYDDR

SEQ ID NO: 10782 - protein, 8 aa, Homo sapiens
DDFNSGFR

SEQ ID NO: 10783 - protein, 13 aa, Homo sapiens
EALTYDGALLGDR

SEQ ID NO: 10784 - protein, 9 aa, Homo sapiens
EEVVQKEQE

SEQ ID NO: 10785 - protein, 8 aa, Homo sapiens
FRDGPPLR

SEQ ID NO: 10786 - protein, 9 aa, Homo sapiens
GSAGGHGSR

SEQ ID NO: 10787 - protein, 14 aa, Homo sapiens
GSNMDFREPTEEER

SEQ ID NO: 10788 - protein, 8 aa, Homo sapiens
TGPPMGSR

SEQ ID NO: 10789 - protein, 21 aa, Homo sapiens
TVATPLNQVANPNSAIFGGAR

SEQ ID NO: 10790 - protein, 23 aa, Homo sapiens
TVATPLNQVANPNSAIFGGARPR

SEQ ID NO: 10791 - protein, 7 aa, Homo sapiens
VDIAEGR

SEQ ID NO: 10792 - protein, 12 aa, Homo sapiens
VAEITGVVETAK

SEQ ID NO: 10793 - protein, 14 aa, Homo sapiens
LTQIQESQVTSHNK

SEQ ID NO: 10794 - protein, 11 aa, Homo sapiens
FNDQDIEEIVK

SEQ ID NO: 10795 - protein, 11 aa, Homo sapiens
IDLQVPSSESK

SEQ ID NO: 10796 - protein, 11 aa, Homo sapiens
NISAISYINQR

SEQ ID NO: 10797 - protein, 12 aa, Homo sapiens
QIQDQLNELEER

SEQ ID NO: 10798 - protein, 12 aa, Homo sapiens
SQPVSLPEELNR

SEQ ID NO: 10799 - protein, 8 aa, Homo sapiens
TVTGCFVR

SEQ ID NO: 10800 - protein, 12 aa, Homo sapiens
SPSTGLYDNLEK

SEQ ID NO: 10801 - protein, 13 aa, Homo sapiens
NLFSQTLSLGSQK

SEQ ID NO: 10802 - protein, 11 aa, Homo sapiens
CYTQNIDTLER

SEQ ID NO: 10803 - protein, 14 aa, Homo sapiens
GKEDLDKWTVTSDK

SEQ ID NO: 10804 - protein, 19 aa, Homo sapiens
EVALDITSSEEKPDVSFDK

SEQ ID NO: 10805 - protein, 11 aa, Homo sapiens
GDGRPWMVNIK

SEQ ID NO: 10806 - protein, 11 aa, Homo sapiens
LLKDEIVDHWR

SEQ ID NO: 10807 - protein, 16 aa, Homo sapiens
GPEGHPLHEVLLEQAK

SEQ ID NO: 10808 - protein, 10 aa, Homo sapiens
DVQHELPLDK

SEQ ID NO: 10809 - protein, 11 aa, Homo sapiens
AIRDEAIYHFR

SEQ ID NO: 10810 - protein, 8 aa, Homo sapiens
EDTDFFQR

SEQ ID NO: 10811 - protein, 23 aa, Homo sapiens
NNQSALLYGTLSSEAPQDGESTR

SEQ ID NO: 10812 - protein, 9 aa, Homo sapiens
SGYCAMISR

SEQ ID NO: 10813 - protein, 12 aa, Homo sapiens
TNQMYSYFMFTR

SEQ ID NO: 10814 - protein, 12 aa, Homo sapiens
DADDAVYELNGK

SEQ ID NO: 10815 - protein, 13 aa, Homo sapiens
ALDKLDGTEINGR

SEQ ID NO: 10816 - protein, 12 aa, Homo sapiens
QAGEVTYADAHK

SEQ ID NO: 10817 - protein, 8 aa, Homo sapiens
DKYGPPVR

SEQ ID NO: 10818 - protein, 10 aa, Homo sapiens
DRDGYSYGSR

SEQ ID NO: 10819 - protein, 7 aa, Homo sapiens
FFSGYGR

SEQ ID NO: 10820 - protein, 7 aa, Homo sapiens
LIEDKPR

SEQ ID NO: 10821 - protein, 9 aa, Homo sapiens
LIVENLSSR

SEQ ID NO: 10822 - protein, 12 aa, Homo sapiens
NGYGFVEFEDSR

SEQ ID NO: 10823 - protein, 9 aa, Homo sapiens
TNEGVIEFR

SEQ ID NO: 10824 - protein, 7 aa, Homo sapiens
VIVEHAR

SEQ ID NO: 10825 - protein, 13 aa, Homo sapiens
GPNGYGFHLHGEK

SEQ ID NO: 10826 - protein, 10 aa, Homo sapiens
EADKSHPEQR

SEQ ID NO: 10827 - protein, 11 aa, Homo sapiens
LVEVNGENVEK

SEQ ID NO: 10828 - protein, 7 aa, Homo sapiens
ETDEFFK

SEQ ID NO: 10829 - protein, 8 aa, Homo sapiens
ETDEFFKK

SEQ ID NO: 10830 - protein, 13 aa, Homo sapiens
GPSGYGFNLHSDK

SEQ ID NO: 10831 - protein, 14 aa, Homo sapiens
KGPSGYGFNLHSDK

SEQ ID NO: 10832 - protein, 8 aa, Homo sapiens
KNELFSNL

SEQ ID NO: 10833 - protein, 20 aa, Homo sapiens
LVEVNGENVEKETHQQVVSR

SEQ ID NO: 10834 - protein, 10 aa, Homo sapiens
LVEPGSPAEK

SEQ ID NO: 10835 - protein, 8 aa, Homo sapiens
APQMDWSK

SEQ ID NO: 10836 - protein, 14 aa, Homo sapiens
LLVVDPETDEQLQK

SEQ ID NO: 10837 - protein, 9 aa, Homo sapiens
RAPQMDWSK

SEQ ID NO: 10838 - protein, 8 aa, Homo sapiens
SKPGQFIR

SEQ ID NO: 10839 - protein, 14 aa, Homo sapiens
LLVVDRETDEFFKK

SEQ ID NO: 10840 - protein, 7 aa, Homo sapiens
AALNAVR

SEQ ID NO: 10841 - protein, 8 aa, Homo sapiens
AGLLAGDR

SEQ ID NO: 10842 - protein, 26 aa, Homo sapiens
AQEAPGQAEPPAAAEVQGAGNENEPR

SEQ ID NO: 10843 - protein, 12 aa, Homo sapiens
EALAEAALESPR

SEQ ID NO: 10844 - protein, 17 aa, Homo sapiens
EALAEAALESPRPALVR

SEQ ID NO: 10845 - protein, 10 aa, Homo sapiens
QHGDVVSAIR

SEQ ID NO: 10846 - protein, 12 aa, Homo sapiens
SADAAAGAPLPR

SEQ ID NO: 10847 - protein, 14 aa, Homo sapiens
SVDPDSPAEASGLR

SEQ ID NO: 10848 - protein, 12 aa, Homo sapiens
ILNHDMTLTEFK

SEQ ID NO: 10849 - protein, 15 aa, Homo sapiens
LTESGLSMVDWHLIK

SEQ ID NO: 10850 - protein, 17 aa, Homo sapiens
EMKPPTSQEEWEAEFQR

SEQ ID NO: 10851 - protein, 8 aa, Homo sapiens
YQQFPEFK

SEQ ID NO: 10852 - protein, 11 aa, Homo sapiens
LPETHQLLQLR

SEQ ID NO: 10853 - protein, 14 aa, Homo sapiens
NVFENPTMVQFDHR

SEQ ID NO: 10854 - protein, 7 aa, Homo sapiens
DLYTQQK

SEQ ID NO: 10855 - protein, 11 aa, Homo sapiens
ILALASFEVEK

SEQ ID NO: 10856 - protein, 15 aa, Homo sapiens
ETLEQLSEFNDSLKK

SEQ ID NO: 10857 - protein, 22 aa, Homo sapiens
LTADDEAFLSANAGAILSQFEK

SEQ ID NO: 10858 - protein, 14 aa, Homo sapiens
ETLEQLSEFNDSLK

SEQ ID NO: 10859 - protein, 25 aa, Homo sapiens
LMQQLQDLEECREELDTDEYEETKK

SEQ ID NO: 10860 - protein, 11 aa, Homo sapiens
LKQNLEEQLDR

SEQ ID NO: 10861 - protein, 12 aa, Homo sapiens
LAEMDRDLMVGK

SEQ ID NO: 10862 - protein, 8 aa, Homo sapiens
VEILTALR

SEQ ID NO: 10863 - protein, 16 aa, Homo sapiens
SAAGATFDLSLFVAQK

SEQ ID NO: 10864 - protein, 24 aa, Homo sapiens
QILLGPNTGLSGGMPGALPSLPGK

SEQ ID NO: 10865 - protein, 25 aa, Homo sapiens
QILLGPNTGLSGGMPGALPSLPGKI

SEQ ID NO: 10866 - protein, 25 aa, Homo sapiens
GDAEKPEEELEEDDDEELDETLSER

SEQ ID NO: 10867 - protein, 21 aa, Homo sapiens
AAAVAAAGAGEPQSPDELLPK

SEQ ID NO: 10868 - protein, 12 aa, Homo sapiens
LQMEQQQQLQQR

SEQ ID NO: 10869 - protein, 11 aa, Homo sapiens
LWGLTEMFPER

SEQ ID NO: 10870 - protein, 9 aa, Homo sapiens
ETDLLILFK

SEQ ID NO: 10871 - protein, 18 aa, Homo sapiens
SPSKPLPEVTDEYKNDVK

SEQ ID NO: 10872 - protein, 14 aa, Homo sapiens
SKAELMEISEDKTK

SEQ ID NO: 10873 - protein, 15 aa, Homo sapiens
NKEVTWEVLEGEVEK

SEQ ID NO: 10874 - protein, 18 aa, Homo sapiens
EVTWEVLEGEVEKEALKK

SEQ ID NO: 10875 - protein, 18 aa, Homo sapiens
GFPTDATLDDIKEWLEDK

SEQ ID NO: 10876 - protein, 8 aa, Homo sapiens
AKQEQEAK

SEQ ID NO: 10877 - protein, 10 aa, Homo sapiens
QKLEEDAEMK

SEQ ID NO: 10878 - protein, 15 aa, Homo sapiens
RSPSKPLPEVTDEYK

SEQ ID NO: 10879 - protein, 11 aa, Homo sapiens
YKETDLLILFK

SEQ ID NO: 10880 - protein, 12 aa, Homo sapiens
KIIEDQQESLNK

SEQ ID NO: 10881 - protein, 7 aa, Homo sapiens
MAALEAK

SEQ ID NO: 10882 - protein, 12 aa, Homo sapiens
AELMEISEDKTK

SEQ ID NO: 10883 - protein, 14 aa, Homo sapiens
EDLHILFSNHGEIK

SEQ ID NO: 10884 - protein, 14 aa, Homo sapiens
SPSKPLPEVTDEYK

SEQ ID NO: 10885 - protein, 13 aa, Homo sapiens
EVTWEVLEGEVEK

SEQ ID NO: 10886 - protein, 13 aa, Homo sapiens
LDEGWVPLEIMIK

SEQ ID NO: 10887 - protein, 11 aa, Homo sapiens
IIEDQQESLNK

SEQ ID NO: 10888 - protein, 12 aa, Homo sapiens
SKAELMEISEDK

SEQ ID NO: 10889 - protein, 9 aa, Homo sapiens
KFVETPGQK

SEQ ID NO: 10890 - protein, 14 aa, Homo sapiens
LTTDFNVIVEALSK

SEQ ID NO: 10891 - protein, 25 aa, Homo sapiens
FSGDLDDQTCREDLHILFSNHGEIK

SEQ ID NO: 10892 - protein, 8 aa, Homo sapiens
LEEDAEMK

SEQ ID NO: 10893 - protein, 8 aa, Homo sapiens
FVETPGQK

SEQ ID NO: 10894 - protein, 14 aa, Homo sapiens
GSIFVVFDSIESAK

SEQ ID NO: 10895 - protein, 10 aa, Homo sapiens
DANNGNLQLR

SEQ ID NO: 10896 - protein, 11 aa, Homo sapiens
FSGDLDDQTCR

SEQ ID NO: 10897 - protein, 9 aa, Homo sapiens
GQVLNIQMR

SEQ ID NO: 10898 - protein, 16 aa, Homo sapiens
ICHQIEYYFGDFNLPR

SEQ ID NO: 10899 - protein, 10 aa, Homo sapiens
GEQWTPIEPK

SEQ ID NO: 10900 - protein, 10 aa, Homo sapiens
ERPQIGGTIK

SEQ ID NO: 10901 - protein, 12 aa, Homo sapiens
PHSYPALSAEQK

SEQ ID NO: 10902 - protein, 16 aa, Homo sapiens
LSESGAIMTDLEENPK

SEQ ID NO: 10903 - protein, 12 aa, Homo sapiens
KPIEDVLLSSVR

SEQ ID NO: 10904 - protein, 15 aa, Homo sapiens
ESLKELEEEAEEEQR

SEQ ID NO: 10905 - protein, 10 aa, Homo sapiens
FGEVLEISGK

SEQ ID NO: 10906 - protein, 13 aa, Homo sapiens
AISTTCIPNYPDR

SEQ ID NO: 10907 - protein, 23 aa, Homo sapiens
TYEDMTLEELEDHEDEFNEEDER

SEQ ID NO: 10908 - protein, 17 aa, Homo sapiens
TLLFTFNVPGSGNTYPK

SEQ ID NO: 10909 - protein, 14 aa, Homo sapiens
EMQDLSEFCSDKPK

SEQ ID NO: 10910 - protein, 12 aa, Homo sapiens
MMRPVSDQVQIK

SEQ ID NO: 10911 - protein, 10 aa, Homo sapiens
LAQAWFNTHR

SEQ ID NO: 10912 - protein, 16 aa, Homo sapiens
LNQENEHIYNLWCSGR

SEQ ID NO: 10913 - protein, 9 aa, Homo sapiens
QDLLNVLAR

SEQ ID NO: 10914 - protein, 18 aa, Homo sapiens
VTMNDEDMDTYVFAVGTR

SEQ ID NO: 10915 - protein, 10 aa, Homo sapiens
SGVAITFLTK

SEQ ID NO: 10916 - protein, 16 aa, Homo sapiens
RPAVVYIGSAGKPHER

SEQ ID NO: 10917 - protein, 9 aa, Homo sapiens
MLANFESGK

SEQ ID NO: 10918 - protein, 22 aa, Homo sapiens
ILEHMPVSNQKPDTDEAEDPEK

SEQ ID NO: 10919 - protein, 17 aa, Homo sapiens
GIDIQDVSMVVNYDMAK

SEQ ID NO: 10920 - protein, 12 aa, Homo sapiens
AQPLSLEELLAK

SEQ ID NO: 10921 - protein, 10 aa, Homo sapiens
EDSAVFYELK

SEQ ID NO: 10922 - protein, 11 aa, Homo sapiens
TLEEKEQEEAR

SEQ ID NO: 10923 - protein, 12 aa, Homo sapiens
DIIGVAETGSGK

SEQ ID NO: 10924 - protein, 12 aa, Homo sapiens
MIDMGFEPDVQK

SEQ ID NO: 10925 - protein, 11 aa, Homo sapiens
KLDEMTDRDWR

SEQ ID NO: 10926 - protein, 9 aa, Homo sapiens
VFLMSESEK

SEQ ID NO: 10927 - protein, 11 aa, Homo sapiens
CTYVVLDEADR

SEQ ID NO: 10928 - protein, 8 aa, Homo sapiens
HQVQLLGR

SEQ ID NO: 10929 - protein, 17 aa, Homo sapiens
IEESDQGPYAIILAPTR

SEQ ID NO: 10930 - protein, 8 aa, Homo sapiens
LIDVLENR

SEQ ID NO: 10931 - protein, 12 aa, Homo sapiens
MGCEIVIATPGR

SEQ ID NO: 10932 - protein, 8 aa, Homo sapiens
MLEDPQER

SEQ ID NO: 10933 - protein, 8 aa, Homo sapiens
NIEDYIHR

SEQ ID NO: 10934 - protein, 10 aa, Homo sapiens
QAIPIGLQNR

SEQ ID NO: 10935 - protein, 16 aa, Homo sapiens
EVPNTVHQFQLDITVK

SEQ ID NO: 10936 - protein, 10 aa, Homo sapiens
GKIELEETIK

SEQ ID NO: 10937 - protein, 16 aa, Homo sapiens
QATSTASTFVKPIFSR

SEQ ID NO: 10938 - protein, 8 aa, Homo sapiens
VVDLLVIK

SEQ ID NO: 10939 - protein, 11 aa, Homo sapiens
FFHETEAPRPK

SEQ ID NO: 10940 - protein, 20 aa, Homo sapiens
GTEGMEPEEGVTVESQPQVK

SEQ ID NO: 10941 - protein, 11 aa, Homo sapiens
HVPLSGSQIVK

SEQ ID NO: 10942 - protein, 14 aa, Homo sapiens
FCAFGGNPPVTGPR

SEQ ID NO: 10943 - protein, 32 aa, Homo sapiens
ILEGPQQSLSGSPLQPIPASPPPQIPPGLRPR

SEQ ID NO: 10944 - protein, 9 aa, Homo sapiens
ILLLEAGPK

SEQ ID NO: 10945 - protein, 10 aa, Homo sapiens
VALIGDAAHR

SEQ ID NO: 10946 - protein, 18 aa, Homo sapiens
KAEEDPEAADSGEPQNKR

SEQ ID NO: 10947 - protein, 29 aa, Homo sapiens
LGPASAADTGSEAKPGALAEGAAEPEPQR

SEQ ID NO: 10948 - protein, 12 aa, Homo sapiens
SSLTQHSWQSLK

SEQ ID NO: 10949 - protein, 22 aa, Homo sapiens
AEAMDLGKDPNGPTHSSTLFVR

SEQ ID NO: 10950 - protein, 7 aa, Homo sapiens
MLVEATR

SEQ ID NO: 10951 - protein, 17 aa, Homo sapiens
NSGELEATSAFLASGQR

SEQ ID NO: 10952 - protein, 10 aa, Homo sapiens
PVTLLASLFK

SEQ ID NO: 10953 - protein, 15 aa, Homo sapiens
LQSPEFQSLFTEGLK

SEQ ID NO: 10954 - protein, 21 aa, Homo sapiens
IVDKPGDHDPETLEAIAENAK

SEQ ID NO: 10955 - protein, 17 aa, Homo sapiens
GVEEAKQELQEVVEFLK

SEQ ID NO: 10956 - protein, 18 aa, Homo sapiens
ANAPCVIFIDELDSVGGK

SEQ ID NO: 10957 - protein, 15 aa, Homo sapiens
NLAEALLTYETLDAK

SEQ ID NO: 10958 - protein, 11 aa, Homo sapiens
DRGSDVESLDK

SEQ ID NO: 10959 - protein, 20 aa, Homo sapiens
GTVGFSGAELENLVNQAALK

SEQ ID NO: 10960 - protein, 15 aa, Homo sapiens
TTTGLDSAVDPVQMK

SEQ ID NO: 10961 - protein, 14 aa, Homo sapiens
LSPETQSAIEQEIR

SEQ ID NO: 10962 - protein, 11 aa, Homo sapiens
TQETLSQAGQK

SEQ ID NO: 10963 - protein, 30 aa, Homo sapiens
TPAVEGLTEAEEEELRAELTKVEEEIVTLR

SEQ ID NO: 10964 - protein, 12 aa, Homo sapiens
KTQETLSQAGQK

SEQ ID NO: 10965 - protein, 10 aa, Homo sapiens
LGLSTLGELK

SEQ ID NO: 10966 - protein, 8 aa, Homo sapiens
VTQSDLYK

SEQ ID NO: 10967 - protein, 15 aa, Homo sapiens
MDSAGQDINLNSPNK

SEQ ID NO: 10968 - protein, 13 aa, Homo sapiens
SWHDVQVSSAYVK

SEQ ID NO: 10969 - protein, 21 aa, Homo sapiens
TPAVEGLTEAEEEELRAELTK

SEQ ID NO: 10970 - protein, 19 aa, Homo sapiens
GLLSDSMTDVPVDTGVAAR

SEQ ID NO: 10971 - protein, 16 aa, Homo sapiens
TPAVEGLTEAEEEELR

SEQ ID NO: 10972 - protein, 14 aa, Homo sapiens
TSAALSTVGSAISR

SEQ ID NO: 10973 - protein, 9 aa, Homo sapiens
VEEEIVTLR

SEQ ID NO: 10974 - protein, 29 aa, Homo sapiens
LYQHYQQQQQVAGGALGATEAQPQGHLQR

SEQ ID NO: 10975 - protein, 10 aa, Homo sapiens
RPGPSGPGGR

SEQ ID NO: 10976 - protein, 10 aa, Homo sapiens
KLIELQAGKK

SEQ ID NO: 10977 - protein, 8 aa, Homo sapiens
KILIEDWK

SEQ ID NO: 10978 - protein, 28 aa, Homo sapiens
PASPAEEDKMPPYDEQTQAFIDAAQEAR

SEQ ID NO: 10979 - protein, 9 aa, Homo sapiens
LIELQAGKK

SEQ ID NO: 10980 - protein, 8 aa, Homo sapiens
ILIEDWKK

SEQ ID NO: 10981 - protein, 9 aa, Homo sapiens
KLIELQAGK

SEQ ID NO: 10982 - protein, 26 aa, Homo sapiens
LGGSPTSLGTWGSWIGPDHDKFSAMK

SEQ ID NO: 10983 - protein, 13 aa, Homo sapiens
AQQEQELAADAFK

SEQ ID NO: 10984 - protein, 8 aa, Homo sapiens
NKFEEAER

SEQ ID NO: 10985 - protein, 10 aa, Homo sapiens
LWEEQLAAAK

SEQ ID NO: 10986 - protein, 20 aa, Homo sapiens
SEALPTDLPAPSAPDLTEPK

SEQ ID NO: 10987 - protein, 11 aa, Homo sapiens
TVKEEAEKPER

SEQ ID NO: 10988 - protein, 21 aa, Homo sapiens
LGGSPTSLGTWGSWIGPDHDK

SEQ ID NO: 10989 - protein, 10 aa, Homo sapiens
SLKDMEESIR

SEQ ID NO: 10990 - protein, 7 aa, Homo sapiens
ILIEDWK

SEQ ID NO: 10991 - protein, 8 aa, Homo sapiens
LIELQAGK

SEQ ID NO: 10992 - protein, 7 aa, Homo sapiens
DMEESIR

SEQ ID NO: 10993 - protein, 13 aa, Homo sapiens
ERESLQQMAEVTR

SEQ ID NO: 10994 - protein, 11 aa, Homo sapiens
ESLQQMAEVTR

SEQ ID NO: 10995 - protein, 12 aa, Homo sapiens
ETMVTSTTEPSR

SEQ ID NO: 10996 - protein, 19 aa, Homo sapiens
MPPYDEQTQAFIDAAQEAR

SEQ ID NO: 10997 - protein, 8 aa, Homo sapiens
PLYIPSNR

SEQ ID NO: 10998 - protein, 10 aa, Homo sapiens
SLEDQVEMLR

SEQ ID NO: 10999 - protein, 13 aa, Homo sapiens
YEQGTGCWQGPNR

SEQ ID NO: 11000 - protein, 22 aa, Homo sapiens
VGDTLDLLIGEDKEAGTETVMR

SEQ ID NO: 11001 - protein, 9 aa, Homo sapiens
NKVEDAFYK

SEQ ID NO: 11002 - protein, 7 aa, Homo sapiens
TGLDIGR

SEQ ID NO: 11003 - protein, 18 aa, Homo sapiens
DLHEEMNYITAIIEEQPK

SEQ ID NO: 11004 - protein, 10 aa, Homo sapiens
ALELCEILAK

SEQ ID NO: 11005 - protein, 14 aa, Homo sapiens
LWDNELQYVDQLLK

SEQ ID NO: 11006 - protein, 13 aa, Homo sapiens
HSTENDSPTNVQQ

SEQ ID NO: 11007 - protein, 8 aa, Homo sapiens
NYQVWHHR

SEQ ID NO: 11008 - protein, 7 aa, Homo sapiens
VLVEWLR

SEQ ID NO: 11009 - protein, 13 aa, Homo sapiens
YFVISNTTGYNDR

SEQ ID NO: 11010 - protein, 22 aa, Homo sapiens
ALPTSKPEGSLHSSPVGPSSSK

SEQ ID NO: 11011 - protein, 10 aa, Homo sapiens
SQLQQFSHIK

SEQ ID NO: 11012 - protein, 12 aa, Homo sapiens
LQKPTDSTASSR

SEQ ID NO: 11013 - protein, 10 aa, Homo sapiens
AATAGPPNAR

SEQ ID NO: 11014 - protein, 19 aa, Homo sapiens
HVEASGGSGPGDSGPSDPR

SEQ ID NO: 11015 - protein, 28 aa, Homo sapiens
VLAAGGLGQGGGGGQSSVLSGISLYDPR

SEQ ID NO: 11016 - protein, 14 aa, Homo sapiens
TYNFLPEFLVSTQK

SEQ ID NO: 11017 - protein, 25 aa, Homo sapiens
VEEQEPELTSTPNFVVEVIKNDDGK

SEQ ID NO: 11018 - protein, 13 aa, Homo sapiens
EVSFQSTGESEWK

SEQ ID NO: 11019 - protein, 11 aa, Homo sapiens
AFVDFLSDEIK

SEQ ID NO: 11020 - protein, 15 aa, Homo sapiens
MSGGWELELNGTEAK

SEQ ID NO: 11021 - protein, 20 aa, Homo sapiens
VEEQEPELTSTPNFVVEVIK

SEQ ID NO: 11022 - protein, 14 aa, Homo sapiens
AFVDFLSDEIKEER

SEQ ID NO: 11023 - protein, 30 aa, Homo sapiens
GVDNTFADELVELSTALEHQEYITFLEDLK

SEQ ID NO: 11024 - protein, 12 aa, Homo sapiens
AEMLEIVQAIYK

SEQ ID NO: 11025 - protein, 13 aa, Homo sapiens
IYGNFFPYGDASK

SEQ ID NO: 11026 - protein, 12 aa, Homo sapiens
LLQCDPSSAGQF

SEQ ID NO: 11027 - protein, 13 aa, Homo sapiens
TFDANGDGTIDFR

SEQ ID NO: 11028 - protein, 10 aa, Homo sapiens
NESSLASTLK

SEQ ID NO: 11029 - protein, 13 aa, Homo sapiens
SYIFEGALGMSNR

SEQ ID NO: 11030 - protein, 20 aa, Homo sapiens
DSNPEEIEIDFETLKPSTLR

SEQ ID NO: 11031 - protein, 13 aa, Homo sapiens
DLPDSQQQHQSSK

SEQ ID NO: 11032 - protein, 17 aa, Homo sapiens
VASMPQEEQELVVTIPK

SEQ ID NO: 11033 - protein, 10 aa, Homo sapiens
DAQEFAADVR

SEQ ID NO: 11034 - protein, 8 aa, Homo sapiens
LLLAPSSK

SEQ ID NO: 11035 - protein, 18 aa, Homo sapiens
ISFGTPAPGFSSMLYGMK

SEQ ID NO: 11036 - protein, 10 aa, Homo sapiens
LCENIAGHLK

SEQ ID NO: 11037 - protein, 16 aa, Homo sapiens
GAGAFGYFEVTHDITK

SEQ ID NO: 11038 - protein, 11 aa, Homo sapiens
DPASDQMQHWK

SEQ ID NO: 11039 - protein, 13 aa, Homo sapiens
FNTANDDNVTQVR

SEQ ID NO: 11040 - protein, 15 aa, Homo sapiens
FSTVAGESGSADTVR

SEQ ID NO: 11041 - protein, 9 aa, Homo sapiens
LFAYPDTHR

SEQ ID NO: 11042 - protein, 9 aa, Homo sapiens
LNVITVGPR

SEQ ID NO: 11043 - protein, 16 aa, Homo sapiens
NAIHTFVQSGSHLAAR

SEQ ID NO: 11044 - protein, 17 aa, Homo sapiens
EGGGNNLYGEEMVQALK

SEQ ID NO: 11045 - protein, 8 aa, Homo sapiens
HVLSVLSK

SEQ ID NO: 11046 - protein, 11 aa, Homo sapiens
ATNWGSLLQDK

SEQ ID NO: 11047 - protein, 9 aa, Homo sapiens
AIENELLAR

SEQ ID NO: 11048 - protein, 9 aa, Homo sapiens
ALAEGVLLR

SEQ ID NO: 11049 - protein, 13 aa, Homo sapiens
EGIAQTVFLGLNR

SEQ ID NO: 11050 - protein, 17 aa, Homo sapiens
QIEINTISASFGGLASR

SEQ ID NO: 11051 - protein, 7 aa, Homo sapiens
SDYMFQR

SEQ ID NO: 11052 - protein, 24 aa, Homo sapiens
VQQELSRPGMLEMLLPGQPEAVAR

SEQ ID NO: 11053 - protein, 13 aa, Homo sapiens
AGSPTLLNCLMYK

SEQ ID NO: 11054 - protein, 10 aa, Homo sapiens
TEEGLGPNIK

SEQ ID NO: 11055 - protein, 11 aa, Homo sapiens
FYSLWDTGYAK

SEQ ID NO: 11056 - protein, 7 aa, Homo sapiens
EAYFWLR

SEQ ID NO: 11057 - protein, 12 aa, Homo sapiens
ESDYFTPQGEFR

SEQ ID NO: 11058 - protein, 9 aa, Homo sapiens
FGEMQLDFR

SEQ ID NO: 11059 - protein, 14 aa, Homo sapiens
HLEEAFTSEHWLVR

SEQ ID NO: 11060 - protein, 7 aa, Homo sapiens
NILDDFR

SEQ ID NO: 11061 - protein, 18 aa, Homo sapiens
SSLNSSPWSGLMALGNSR

SEQ ID NO: 11062 - protein, 7 aa, Homo sapiens
TPPGFDR

SEQ ID NO: 11063 - protein, 18 aa, Homo sapiens
MSPDEGQEELEEVQAELK

SEQ ID NO: 11064 - protein, 25 aa, Homo sapiens
NKEPPAPAQQLQPQPVAVQGPEPAR

SEQ ID NO: 11065 - protein, 11 aa, Homo sapiens
SQLTTIVLAAR

SEQ ID NO: 11066 - protein, 29 aa, Homo sapiens
TAVIDHHNYDISDLGQHTLIVADTENLLK

SEQ ID NO: 11067 - protein, 10 aa, Homo sapiens
WVFKEEGVLR

SEQ ID NO: 11068 - protein, 11 aa, Homo sapiens
LPDVYGVFQFK

SEQ ID NO: 11069 - protein, 14 aa, Homo sapiens
ELGSECGIEFDEEK

SEQ ID NO: 11070 - protein, 11 aa, Homo sapiens
TADDPSLSLIK

SEQ ID NO: 11071 - protein, 7 aa, Homo sapiens
GFELTFK

SEQ ID NO: 11072 - protein, 8 aa, Homo sapiens
ETHSLFFR

SEQ ID NO: 11073 - protein, 24 aa, Homo sapiens
LGYTHLYSSTQVSVRPLQHTQYER

SEQ ID NO: 11074 - protein, 11 aa, Homo sapiens
NTLLIAGLQAR

SEQ ID NO: 11075 - protein, 9 aa, Homo sapiens
PLQHTQYER

SEQ ID NO: 11076 - protein, 9 aa, Homo sapiens
SSLNPILFR

SEQ ID NO: 11077 - protein, 11 aa, Homo sapiens
TLVLLDNLNVR

SEQ ID NO: 11078 - protein, 15 aa, Homo sapiens
WVPFDGDDIQLEFVR

SEQ ID NO: 11079 - protein, 15 aa, Homo sapiens
YSQTGNYELAVALSR

SEQ ID NO: 11080 - protein, 8 aa, Homo sapiens
DSEIMQQK

SEQ ID NO: 11081 - protein, 9 aa, Homo sapiens
DDGLSAAAR

SEQ ID NO: 11082 - protein, 10 aa, Homo sapiens
RDDGLSAAAR

SEQ ID NO: 11083 - protein, 11 aa, Homo sapiens
RRDDGLSAAAR

SEQ ID NO: 11084 - protein, 21 aa, Homo sapiens
GAVLVCAWAEEGADALGPDGK

SEQ ID NO: 11085 - protein, 12 aa, Homo sapiens
HLGFQSAEEALR

SEQ ID NO: 11086 - protein, 24 aa, Homo sapiens
YTVFQTTGSVPIATVIINEASGSR

SEQ ID NO: 11087 - protein, 11 aa, Homo sapiens
KSEGDGDKEEK

SEQ ID NO: 11088 - protein, 20 aa, Homo sapiens
ILEQEEEEEQAGKPGEPSKK

SEQ ID NO: 11089 - protein, 17 aa, Homo sapiens
QQMQDFFLAHKDEEWFR

SEQ ID NO: 11090 - protein, 8 aa, Homo sapiens
MLDAAVIK

SEQ ID NO: 11091 - protein, 13 aa, Homo sapiens
FVTSNTQELGKDK

SEQ ID NO: 11092 - protein, 13 aa, Homo sapiens
EVAFFNNFLTDAK

SEQ ID NO: 11093 - protein, 8 aa, Homo sapiens
AEIISLCK

SEQ ID NO: 11094 - protein, 8 aa, Homo sapiens
WLCPLSGK

SEQ ID NO: 11095 - protein, 19 aa, Homo sapiens
ILEQEEEEEQAGKPGEPSK

SEQ ID NO: 11096 - protein, 11 aa, Homo sapiens
FVTSNTQELGK

SEQ ID NO: 11097 - protein, 11 aa, Homo sapiens
ISHGEVLEWQK

SEQ ID NO: 11098 - protein, 8 aa, Homo sapiens
RPALPEIK

SEQ ID NO: 11099 - protein, 17 aa, Homo sapiens
LGSIAEIDLGVPPPVMK

SEQ ID NO: 11100 - protein, 10 aa, Homo sapiens
ESLSEEEAQK

SEQ ID NO: 11101 - protein, 9 aa, Homo sapiens
KDPEQEVEK

SEQ ID NO: 11102 - protein, 10 aa, Homo sapiens
AGAGLGDGER

SEQ ID NO: 11103 - protein, 7 aa, Homo sapiens
CGIIHVR

SEQ ID NO: 11104 - protein, 11 aa, Homo sapiens
DLDAPDDVDFF

SEQ ID NO: 11105 - protein, 10 aa, Homo sapiens
ECELSPGVNR

SEQ ID NO: 11106 - protein, 10 aa, Homo sapiens
EICWNLQNIR

SEQ ID NO: 11107 - protein, 7 aa, Homo sapiens
GWVTFDR

SEQ ID NO: 11108 - protein, 22 aa, Homo sapiens
IVHSLDYYNTCEYPNEDEMPNR

SEQ ID NO: 11109 - protein, 8 aa, Homo sapiens
LIHTLDDR

SEQ ID NO: 11110 - protein, 12 aa, Homo sapiens
LRECELSPGVNR

SEQ ID NO: 11111 - protein, 8 aa, Homo sapiens
LTPLLSVR

SEQ ID NO: 11112 - protein, 10 aa, Homo sapiens
MEGGTENDLR

SEQ ID NO: 11113 - protein, 8 aa, Homo sapiens
NIAPNISR

SEQ ID NO: 11114 - protein, 7 aa, Homo sapiens
RYPGFMR

SEQ ID NO: 11115 - protein, 7 aa, Homo sapiens
TCSLFMR

SEQ ID NO: 11116 - protein, 10 aa, Homo sapiens
VALSEPQPER

SEQ ID NO: 11117 - protein, 10 aa, Homo sapiens
ALEENNNFSK

SEQ ID NO: 11118 - protein, 9 aa, Homo sapiens
EDAVSFAEK

SEQ ID NO: 11119 - protein, 15 aa, Homo sapiens
LDITTLTGVPEEHIK

SEQ ID NO: 11120 - protein, 10 aa, Homo sapiens
SYGANFSWNK

SEQ ID NO: 11121 - protein, 21 aa, Homo sapiens
ATGEADVEFVTHEDAVAAMSK

SEQ ID NO: 11122 - protein, 9 aa, Homo sapiens
EIAENALGK

SEQ ID NO: 11123 - protein, 12 aa, Homo sapiens
STGEAFVQFASK

SEQ ID NO: 11124 - protein, 8 aa, Homo sapiens
DKNNMQHR

SEQ ID NO: 11125 - protein, 17 aa, Homo sapiens
ATENDIANFFSPLNPIR

SEQ ID NO: 11126 - protein, 14 aa, Homo sapiens
DGMDNQGGYGSVGR

SEQ ID NO: 11127 - protein, 20 aa, Homo sapiens
GGGGSGGYYGQGGMSGGGWR

SEQ ID NO: 11128 - protein, 26 aa, Homo sapiens
GMGGHGYGGAGDASSGFHGGHFVHMR

SEQ ID NO: 11129 - protein, 13 aa, Homo sapiens
HNGPNDASDGTVR

SEQ ID NO: 11130 - protein, 11 aa, Homo sapiens
LLGQRPGPYDR

SEQ ID NO: 11131 - protein, 32 aa, Homo sapiens
RGGDGYDGGYGGFDDYGGYNNYGYGNDGFDDR

SEQ ID NO: 11132 - protein, 10 aa, Homo sapiens
VHIDIGADGR

SEQ ID NO: 11133 - protein, 7 aa, Homo sapiens
LQFSLKK

SEQ ID NO: 11134 - protein, 29 aa, Homo sapiens
KLGVNNISGIEEVNMFTNQGTVIHFNNPK

SEQ ID NO: 11135 - protein, 8 aa, Homo sapiens
TATADDKK

SEQ ID NO: 11136 - protein, 7 aa, Homo sapiens
KLQFSLK

SEQ ID NO: 11137 - protein, 10 aa, Homo sapiens
MKETIMNQEK

SEQ ID NO: 11138 - protein, 25 aa, Homo sapiens
APLATGEDDDDEVPDLVENFDEASK

SEQ ID NO: 11139 - protein, 8 aa, Homo sapiens
ETIMNQEK

SEQ ID NO: 11140 - protein, 7 aa, Homo sapiens
LAEALPK

SEQ ID NO: 11141 - protein, 19 aa, Homo sapiens
VQASLAANTFTITGHAETK

SEQ ID NO: 11142 - protein, 8 aa, Homo sapiens
RLAEALPK

SEQ ID NO: 11143 - protein, 22 aa, Homo sapiens
QLTEMLPSILNQLGADSLTSLR

SEQ ID NO: 11144 - protein, 23 aa, Homo sapiens
QLTEMLPSILNQLGADSLTSLRR

SEQ ID NO: 11145 - protein, 11 aa, Homo sapiens
LQIQCVVEDDK

SEQ ID NO: 11146 - protein, 24 aa, Homo sapiens
KLQIQCVVEDDKVGTDLLEEEITK

SEQ ID NO: 11147 - protein, 7 aa, Homo sapiens
IWFDKFK

SEQ ID NO: 11148 - protein, 8 aa, Homo sapiens
FKYDDAER

SEQ ID NO: 11149 - protein, 16 aa, Homo sapiens
FEEHVQSVDIAAFNKI

SEQ ID NO: 11150 - protein, 24 aa, Homo sapiens
SSILLDVKPWDDETDMAQLEACVR

SEQ ID NO: 11151 - protein, 15 aa, Homo sapiens
FEEHVQSVDIAAFNK

SEQ ID NO: 11152 - protein, 13 aa, Homo sapiens
SIQLDGLVWGASK

SEQ ID NO: 11153 - protein, 23 aa, Homo sapiens
LQIQCVVEDDKVGTDLLEEEITK

SEQ ID NO: 11154 - protein, 12 aa, Homo sapiens
GVVQELQQAISK

SEQ ID NO: 11155 - protein, 9 aa, Homo sapiens
ATNFLAHEK

SEQ ID NO: 11156 - protein, 13 aa, Homo sapiens
ATAPQTQHVSPMR

SEQ ID NO: 11157 - protein, 14 aa, Homo sapiens
FYEQMNGPVAGASR

SEQ ID NO: 11158 - protein, 12 aa, Homo sapiens
IASLEVENQSLR

SEQ ID NO: 11159 - protein, 9 aa, Homo sapiens
LVPVGYGIR

SEQ ID NO: 11160 - protein, 10 aa, Homo sapiens
QENGASVILR

SEQ ID NO: 11161 - protein, 15 aa, Homo sapiens
RFYEQMNGPVAGASR

SEQ ID NO: 11162 - protein, 24 aa, Homo sapiens
SLAGSSGPGASSGTSGDHGELVVR

SEQ ID NO: 11163 - protein, 16 aa, Homo sapiens
TKAPQDVEMKDLEDES

SEQ ID NO: 11164 - protein, 8 aa, Homo sapiens
TSEPQLKR

SEQ ID NO: 11165 - protein, 7 aa, Homo sapiens
TSEPQLK

SEQ ID NO: 11166 - protein, 14 aa, Homo sapiens
APQDVEMKDLEDES

SEQ ID NO: 11167 - protein, 13 aa, Homo sapiens
TAMEVEAPSKPAR

SEQ ID NO: 11168 - protein, 8 aa, Homo sapiens
ANITLSGK

SEQ ID NO: 11169 - protein, 13 aa, Homo sapiens
VVGAVIDQGLITR

SEQ ID NO: 11170 - protein, 14 aa, Homo sapiens
DSESSPNDFSVSLK

SEQ ID NO: 11171 - protein, 10 aa, Homo sapiens
HQAEMALNER

SEQ ID NO: 11172 - protein, 11 aa, Homo sapiens
TGFVPSNYVER

SEQ ID NO: 11173 - protein, 17 aa, Homo sapiens
SELKDFFQSYGNVVELR

SEQ ID NO: 11174 - protein, 16 aa, Homo sapiens
FMQTFVLAPEGSVANK

SEQ ID NO: 11175 - protein, 18 aa, Homo sapiens
HPDSHQLFIGNLPHEVDK

SEQ ID NO: 11176 - protein, 12 aa, Homo sapiens
VMEKPSPLLVGR

SEQ ID NO: 11177 - protein, 12 aa, Homo sapiens
VMSQNFTNCHTK

SEQ ID NO: 11178 - protein, 10 aa, Homo sapiens
TFSWASVTSK

SEQ ID NO: 11179 - protein, 17 aa, Homo sapiens
LPNFGFVVFDDSEPVQK

SEQ ID NO: 11180 - protein, 22 aa, Homo sapiens
HPDSHQLFIGNLPHEVDKSELK

SEQ ID NO: 11181 - protein, 13 aa, Homo sapiens
DFFQSYGNVVELR

SEQ ID NO: 11182 - protein, 11 aa, Homo sapiens
EAGEQGDIEPR

SEQ ID NO: 11183 - protein, 9 aa, Homo sapiens
FYVHNDIFR

SEQ ID NO: 11184 - protein, 15 aa, Homo sapiens
QYYTLLNQAPDMLHR

SEQ ID NO: 11185 - protein, 18 aa, Homo sapiens
SSSPAPADIAQTVQEDLR

SEQ ID NO: 11186 - protein, 10 aa, Homo sapiens
VLSNRPIMFR

SEQ ID NO: 11187 - protein, 27 aa, Homo sapiens
YQDEVFGGFVTEPQEESEEEVEEPEER

SEQ ID NO: 11188 - protein, 28 aa, Homo sapiens
LAVNNIAGIEEVNMIKDDGTVIHFNNPK

SEQ ID NO: 11189 - protein, 12 aa, Homo sapiens
DDGTVIHFNNPK

SEQ ID NO: 11190 - protein, 30 aa, Homo sapiens
APKPEDIDEEDDDVPDLVENFDEASKNEAN

SEQ ID NO: 11191 - protein, 8 aa, Homo sapiens
KLAEQFPR

SEQ ID NO: 11192 - protein, 16 aa, Homo sapiens
LAVNNIAGIEEVNMIK

SEQ ID NO: 11193 - protein, 19 aa, Homo sapiens
VQASLSANTFAITGHAEAK

SEQ ID NO: 11194 - protein, 22 aa, Homo sapiens
PITEMLPGILSQLGADSLTSLR

SEQ ID NO: 11195 - protein, 12 aa, Homo sapiens
GKESEKELALVK

SEQ ID NO: 11196 - protein, 8 aa, Homo sapiens
TCDLVGEK

SEQ ID NO: 11197 - protein, 10 aa, Homo sapiens
ESEKELALVK

SEQ ID NO: 11198 - protein, 9 aa, Homo sapiens
AVVMISCNR

SEQ ID NO: 11199 - protein, 21 aa, Homo sapiens
GVGDDQLGEESEERDDHLLPM

SEQ ID NO: 11200 - protein, 14 aa, Homo sapiens
HTLADNFNPVSEER

SEQ ID NO: 11201 - protein, 18 aa, Homo sapiens
SFESTVGQGSDTYIYIFR

SEQ ID NO: 11202 - protein, 13 aa, Homo sapiens
KLLDSWFTSTQEK

SEQ ID NO: 11203 - protein, 12 aa, Homo sapiens
LLDSWFTSTQEK

SEQ ID NO: 11204 - protein, 12 aa, Homo sapiens
AAGTDGSDFQHR

SEQ ID NO: 11205 - protein, 7 aa, Homo sapiens
MSVGHLR

SEQ ID NO: 11206 - protein, 9 aa, Homo sapiens
HVVFYPTLK

SEQ ID NO: 11207 - protein, 16 aa, Homo sapiens
MVWDSQVSEHFFEYKK

SEQ ID NO: 11208 - protein, 12 aa, Homo sapiens
FTQISPVWLQLK

SEQ ID NO: 11209 - protein, 15 aa, Homo sapiens
MVWDSQVSEHFFEYK

SEQ ID NO: 11210 - protein, 8 aa, Homo sapiens
GLVVTDLK

SEQ ID NO: 11211 - protein, 14 aa, Homo sapiens
NVLDSEDEIEELSK

SEQ ID NO: 11212 - protein, 22 aa, Homo sapiens
HFAGDVLGYVTPWNSHGYDVTK

SEQ ID NO: 11213 - protein, 9 aa, Homo sapiens
AESVVLEHR

SEQ ID NO: 11214 - protein, 17 aa, Homo sapiens
EMFEVTGLHDVDQGWMR

SEQ ID NO: 11215 - protein, 7 aa, Homo sapiens
GLHIVPR

SEQ ID NO: 11216 - protein, 12 aa, Homo sapiens
LLFEDWTYDDFR

SEQ ID NO: 11217 - protein, 11 aa, Homo sapiens
SQFSDKPVQDR

SEQ ID NO: 11218 - protein, 11 aa, Homo sapiens
VAGNFHFAPGK

SEQ ID NO: 11219 - protein, 14 aa, Homo sapiens
LDKDGIPVSSEAER

SEQ ID NO: 11220 - protein, 8 aa, Homo sapiens
VVPTVYMK

SEQ ID NO: 11221 - protein, 28 aa, Homo sapiens
VEVTVFDPDSLDPDRCESCYGAEAEDIK

SEQ ID NO: 11222 - protein, 14 aa, Homo sapiens
NEGCQVYGFLEVNK

SEQ ID NO: 11223 - protein, 9 aa, Homo sapiens
NPDTIEQCR

SEQ ID NO: 11224 - protein, 8 aa, Homo sapiens
TNQFSVTR

SEQ ID NO: 11225 - protein, 15 aa, Homo sapiens
VEVTVFDPDSLDPDR

SEQ ID NO: 11226 - protein, 27 aa, Homo sapiens
TSNTDGIDSFLDKVDEVSTEPIPESWR

SEQ ID NO: 11227 - protein, 9 aa, Homo sapiens
AEQSDEAVK

SEQ ID NO: 11228 - protein, 14 aa, Homo sapiens
TFIIGELHPDDRPK

SEQ ID NO: 11229 - protein, 9 aa, Homo sapiens
YYTLEEIQK

SEQ ID NO: 11230 - protein, 21 aa, Homo sapiens
EQAGGDATENFEDVGHSTDAR

SEQ ID NO: 11231 - protein, 13 aa, Homo sapiens
FLEEHPGGEEVLR

SEQ ID NO: 11232 - protein, 9 aa, Homo sapiens
FLAEEGFYK

SEQ ID NO: 11233 - protein, 13 aa, Homo sapiens
EGSPVLLNCLMYK

SEQ ID NO: 11234 - protein, 11 aa, Homo sapiens
VGQAMASTEEK

SEQ ID NO: 11235 - protein, 11 aa, Homo sapiens
FYSLLDPSYAK

SEQ ID NO: 11236 - protein, 10 aa, Homo sapiens
NLDISRPDKK

SEQ ID NO: 11237 - protein, 9 aa, Homo sapiens
FGQVYTEAK

SEQ ID NO: 11238 - protein, 7 aa, Homo sapiens
AWYPLGR

SEQ ID NO: 11239 - protein, 7 aa, Homo sapiens
EAYYWLR

SEQ ID NO: 11240 - protein, 12 aa, Homo sapiens
ENDYYTPTGEFR

SEQ ID NO: 11241 - protein, 15 aa, Homo sapiens
FESVIHEFDPYFNYR

SEQ ID NO: 11242 - protein, 8 aa, Homo sapiens
FHNWFDDR

SEQ ID NO: 11243 - protein, 7 aa, Homo sapiens
IIFDDFR

SEQ ID NO: 11244 - protein, 11 aa, Homo sapiens
LNPQQFEVLFR

SEQ ID NO: 11245 - protein, 7 aa, Homo sapiens
RPPGFDR

SEQ ID NO: 11246 - protein, 21 aa, Homo sapiens
PVSQLVAQQVTQQFVPPTQSK

SEQ ID NO: 11247 - protein, 25 aa, Homo sapiens
SPPASSAASADQHSQSGSSSDNTER

SEQ ID NO: 11248 - protein, 24 aa, Homo sapiens
KTEEMLSNQMLSGIPEVDLGIDAK

SEQ ID NO: 11249 - protein, 15 aa, Homo sapiens
VQEETTLVDDPFQMK

SEQ ID NO: 11250 - protein, 20 aa, Homo sapiens
DSETSFVPTNMAVNYVQHNR

SEQ ID NO: 11251 - protein, 11 aa, Homo sapiens
FYHEELNAPIR

SEQ ID NO: 11252 - protein, 14 aa, Homo sapiens
NAEDCLYELPENIR

SEQ ID NO: 11253 - protein, 8 aa, Homo sapiens
YIETELKK

SEQ ID NO: 11254 - protein, 13 aa, Homo sapiens
FIADQLDHLNVTK

SEQ ID NO: 11255 - protein, 15 aa, Homo sapiens
KLVILEGELERAEER

SEQ ID NO: 11256 - protein, 8 aa, Homo sapiens
TIDDLEEK

SEQ ID NO: 11257 - protein, 13 aa, Homo sapiens
YSEKEDKYEEEIK

SEQ ID NO: 11258 - protein, 16 aa, Homo sapiens
CGDLEEELKNVTNNLK

SEQ ID NO: 11259 - protein, 15 aa, Homo sapiens
KIQALQQQADEAEDR

SEQ ID NO: 11260 - protein, 7 aa, Homo sapiens
AEVSELK

SEQ ID NO: 11261 - protein, 9 aa, Homo sapiens
CGDLEEELK

SEQ ID NO: 11262 - protein, 12 aa, Homo sapiens
EKAEGDVAALNR

SEQ ID NO: 11263 - protein, 10 aa, Homo sapiens
AEGDVAALNR

SEQ ID NO: 11264 - protein, 20 aa, Homo sapiens
EENVGLHQTLDQTLNELNCI

SEQ ID NO: 11265 - protein, 14 aa, Homo sapiens
IQALQQQADEAEDR

SEQ ID NO: 11266 - protein, 10 aa, Homo sapiens
LVILEGELER

SEQ ID NO: 11267 - protein, 14 aa, Homo sapiens
LVILEGELERAEER

SEQ ID NO: 11268 - protein, 8 aa, Homo sapiens
LLYGFLIK

SEQ ID NO: 11269 - protein, 22 aa, Homo sapiens
GKFPVQLENVDSFVELGQVALR

SEQ ID NO: 11270 - protein, 12 aa, Homo sapiens
NQVEDLLATLEK

SEQ ID NO: 11271 - protein, 11 aa, Homo sapiens
ALADVATVLGR

SEQ ID NO: 11272 - protein, 9 aa, Homo sapiens
APDVTTLPR

SEQ ID NO: 11273 - protein, 11 aa, Homo sapiens
SGAGVPAVILR

SEQ ID NO: 11274 - protein, 13 aa, Homo sapiens
KIADDKYNDTFWK

SEQ ID NO: 11275 - protein, 8 aa, Homo sapiens
KTLDMIKK

SEQ ID NO: 11276 - protein, 24 aa, Homo sapiens
IKEDEDDKTVLDLAVVLFETATLR

SEQ ID NO: 11277 - protein, 20 aa, Homo sapiens
ESDDPMAYIHFTAEGEVTFK

SEQ ID NO: 11278 - protein, 10 aa, Homo sapiens
GLFDEYGSKK

SEQ ID NO: 11279 - protein, 15 aa, Homo sapiens
TETVEEPMEEEEAAK

SEQ ID NO: 11280 - protein, 18 aa, Homo sapiens
TETVEEPMEEEEAAKEEK

SEQ ID NO: 11281 - protein, 16 aa, Homo sapiens
KYSQFINFPIYVWSSK

SEQ ID NO: 11282 - protein, 7 aa, Homo sapiens
KTLDMIK

SEQ ID NO: 11283 - protein, 10 aa, Homo sapiens
EGVKFDESEK

SEQ ID NO: 11284 - protein, 20 aa, Homo sapiens
TVWDWELMNDIKPIWQRPSK

SEQ ID NO: 11285 - protein, 8 aa, Homo sapiens
KTFEINPR

SEQ ID NO: 11286 - protein, 26 aa, Homo sapiens
KGYEVIYLTEPVDEYCIQALPEFDGK

SEQ ID NO: 11287 - protein, 8 aa, Homo sapiens
EVEEDEYK

SEQ ID NO: 11288 - protein, 9 aa, Homo sapiens
ESTAEKDEL

SEQ ID NO: 11289 - protein, 15 aa, Homo sapiens
EAVEKEFEPLLNWMK

SEQ ID NO: 11290 - protein, 15 aa, Homo sapiens
YSQFINFPIYVWSSK

SEQ ID NO: 11291 - protein, 12 aa, Homo sapiens
IADDKYNDTFWK

SEQ ID NO: 11292 - protein, 7 aa, Homo sapiens
NKEIFLR

SEQ ID NO: 11293 - protein, 11 aa, Homo sapiens
KEAESSPFVER

SEQ ID NO: 11294 - protein, 11 aa, Homo sapiens
DISTNYYASQK

SEQ ID NO: 11295 - protein, 7 aa, Homo sapiens
YNDTFWK

SEQ ID NO: 11296 - protein, 27 aa, Homo sapiens
KGYEVIYLTEPVDEYCIQALPEFDGKR

SEQ ID NO: 11297 - protein, 14 aa, Homo sapiens
ELISNASDALDKIR

SEQ ID NO: 11298 - protein, 9 aa, Homo sapiens
GTTITLVLK

SEQ ID NO: 11299 - protein, 19 aa, Homo sapiens
LISLTDENALSGNEELTVK

SEQ ID NO: 11300 - protein, 13 aa, Homo sapiens
EEASDYLELDTIK

SEQ ID NO: 11301 - protein, 10 aa, Homo sapiens
EFEPLLNWMK

SEQ ID NO: 11302 - protein, 17 aa, Homo sapiens
TVWDWELMNDIKPIWQR

SEQ ID NO: 11303 - protein, 12 aa, Homo sapiens
TVWDWELMNDIK

SEQ ID NO: 11304 - protein, 19 aa, Homo sapiens
NLLHVTDTGVGMTREELVK

SEQ ID NO: 11305 - protein, 26 aa, Homo sapiens
GYEVIYLTEPVDEYCIQALPEFDGKR

SEQ ID NO: 11306 - protein, 9 aa, Homo sapiens
GLFDEYGSK

SEQ ID NO: 11307 - protein, 13 aa, Homo sapiens
VFITDDFHDMMPK

SEQ ID NO: 11308 - protein, 14 aa, Homo sapiens
RVFITDDFHDMMPK

SEQ ID NO: 11309 - protein, 12 aa, Homo sapiens
ELISNASDALDK

SEQ ID NO: 11310 - protein, 16 aa, Homo sapiens
EESDDEAAVEEEEEEK

SEQ ID NO: 11311 - protein, 9 aa, Homo sapiens
SGYLLPDTK

SEQ ID NO: 11312 - protein, 9 aa, Homo sapiens
SGTSEFLNK

SEQ ID NO: 11313 - protein, 7 aa, Homo sapiens
TLDMIKK

SEQ ID NO: 11314 - protein, 8 aa, Homo sapiens
LIINSLYK

SEQ ID NO: 11315 - protein, 10 aa, Homo sapiens
LSLNIDPDAK

SEQ ID NO: 11316 - protein, 8 aa, Homo sapiens
PIWQRPSK

SEQ ID NO: 11317 - protein, 10 aa, Homo sapiens
EAESSPFVER

SEQ ID NO: 11318 - protein, 16 aa, Homo sapiens
EEEAIQLDGLNASQIR

SEQ ID NO: 11319 - protein, 28 aa, Homo sapiens
EGSRTDDEVVQREEEAIQLDGLNASQIR

SEQ ID NO: 11320 - protein, 9 aa, Homo sapiens
FAFQAEVNR

SEQ ID NO: 11321 - protein, 19 aa, Homo sapiens
FQSSHHPTDITSLDQYVER

SEQ ID NO: 11322 - protein, 14 aa, Homo sapiens
GVVDSDDLPLNVSR

SEQ ID NO: 11323 - protein, 9 aa, Homo sapiens
IYFMAGSSR

SEQ ID NO: 11324 - protein, 10 aa, Homo sapiens
LGVIEDHSNR

SEQ ID NO: 11325 - protein, 21 aa, Homo sapiens
LTESPCALVASQYGWSGNMER

SEQ ID NO: 11326 - protein, 14 aa, Homo sapiens
NLLHVTDTGVGMTR

SEQ ID NO: 11327 - protein, 11 aa, Homo sapiens
SILFVPTSAPR

SEQ ID NO: 11328 - protein, 8 aa, Homo sapiens
TDDEVVQR

SEQ ID NO: 11329 - protein, 24 aa, Homo sapiens
TDDEVVQREEEAIQLDGLNASQIR

SEQ ID NO: 11330 - protein, 7 aa, Homo sapiens
TFEINPR

SEQ ID NO: 11331 - protein, 16 aa, Homo sapiens
VKAEEDKIPLLVVGNK

SEQ ID NO: 11332 - protein, 16 aa, Homo sapiens
SKAEEWGVQYVETSAK

SEQ ID NO: 11333 - protein, 20 aa, Homo sapiens
SALTLQFMYDEFVEDYEPTK

SEQ ID NO: 11334 - protein, 11 aa, Homo sapiens
VIMVGSGGVGK

SEQ ID NO: 11335 - protein, 9 aa, Homo sapiens
GQSSLALHK

SEQ ID NO: 11336 - protein, 8 aa, Homo sapiens
QVPVEEAR

SEQ ID NO: 11337 - protein, 9 aa, Homo sapiens
RQVPVEEAR

SEQ ID NO: 11338 - protein, 7 aa, Homo sapiens
VFFDLMR

SEQ ID NO: 11339 - protein, 25 aa, Homo sapiens
VVLDGEEVQIDILDTAGQEDYAAIR

SEQ ID NO: 11340 - protein, 24 aa, Homo sapiens
SSILLDVKPWDDETDMAKLEECVR

SEQ ID NO: 11341 - protein, 18 aa, Homo sapiens
YGPADVEDTTGSGATDSK

SEQ ID NO: 11342 - protein, 13 aa, Homo sapiens
SIQADGLVWGSSK

SEQ ID NO: 11343 - protein, 15 aa, Homo sapiens
SPAGLQVLNDYLADK

SEQ ID NO: 11344 - protein, 18 aa, Homo sapiens
SSILLDVKPWDDETDMAK

SEQ ID NO: 11345 - protein, 32 aa, Homo sapiens
SYIEGYVPSQADVAVFEAVSSPPPADLCHALR

SEQ ID NO: 11346 - protein, 12 aa, Homo sapiens
QDSLSSEVDTLK

SEQ ID NO: 11347 - protein, 15 aa, Homo sapiens
RLEEGTEETSETLEK

SEQ ID NO: 11348 - protein, 15 aa, Homo sapiens
AQGGSSDSSLALHER

SEQ ID NO: 11349 - protein, 13 aa, Homo sapiens
ASQAEISSLQSVR

SEQ ID NO: 11350 - protein, 18 aa, Homo sapiens
LFSTLDPELMLNPENLPR

SEQ ID NO: 11351 - protein, 11 aa, Homo sapiens
LGELQGEAASR

SEQ ID NO: 11352 - protein, 14 aa, Homo sapiens
QWYQQQLALAQEAR

SEQ ID NO: 11353 - protein, 17 aa, Homo sapiens
YSDVSGLLANYTDPQSK

SEQ ID NO: 11354 - protein, 24 aa, Homo sapiens
ALPWQLNDPNYFSIDAPPSFKPAK

SEQ ID NO: 11355 - protein, 13 aa, Homo sapiens
MVPSEFSTGPVEK

SEQ ID NO: 11356 - protein, 17 aa, Homo sapiens
AAQIPIVATTSTPGIVR

SEQ ID NO: 11357 - protein, 11 aa, Homo sapiens
FSTIEEFSYIR

SEQ ID NO: 11358 - protein, 13 aa, Homo sapiens
LPSDVVTGYLALR

SEQ ID NO: 11359 - protein, 14 aa, Homo sapiens
RLPSDVVTGYLALR

SEQ ID NO: 11360 - protein, 8 aa, Homo sapiens
ILIDSIYK

SEQ ID NO: 11361 - protein, 7 aa, Homo sapiens
KIAQYLK

SEQ ID NO: 11362 - protein, 28 aa, Homo sapiens
INPSAGEAFPQAVDVLLYTPGHLDPAEK

SEQ ID NO: 11363 - protein, 19 aa, Homo sapiens
AKFYPEDVAEELIQDITQK

SEQ ID NO: 11364 - protein, 11 aa, Homo sapiens
KEDEVEEWQHR

SEQ ID NO: 11365 - protein, 7 aa, Homo sapiens
DDRNEEK

SEQ ID NO: 11366 - protein, 26 aa, Homo sapiens
EGILSDEIYCPPETAVLLGSYAVQAK

SEQ ID NO: 11367 - protein, 8 aa, Homo sapiens
KENPLQFK

SEQ ID NO: 11368 - protein, 12 aa, Homo sapiens
RKEDEVEEWQHR

SEQ ID NO: 11369 - protein, 10 aa, Homo sapiens
AKEAQDDLVK

SEQ ID NO: 11370 - protein, 7 aa, Homo sapiens
GFPTWLK

SEQ ID NO: 11371 - protein, 16 aa, Homo sapiens
IAQDLEMYGINYFEIK

SEQ ID NO: 11372 - protein, 17 aa, Homo sapiens
FYPEDVAEELIQDITQK

SEQ ID NO: 11373 - protein, 8 aa, Homo sapiens
EKEELMLR

SEQ ID NO: 11374 - protein, 15 aa, Homo sapiens
SQEQLAAELAEYTAK

SEQ ID NO: 11375 - protein, 7 aa, Homo sapiens
ENPLQFK

SEQ ID NO: 11376 - protein, 9 aa, Homo sapiens
DNAMLEYLK

SEQ ID NO: 11377 - protein, 8 aa, Homo sapiens
ALQLEEER

SEQ ID NO: 11378 - protein, 12 aa, Homo sapiens
AQEEAERLEADR

SEQ ID NO: 11379 - protein, 10 aa, Homo sapiens
EDEVEEWQHR

SEQ ID NO: 11380 - protein, 8 aa, Homo sapiens
ELSEQIQR

SEQ ID NO: 11381 - protein, 14 aa, Homo sapiens
ILQLCMGNHELYMR

SEQ ID NO: 11382 - protein, 9 aa, Homo sapiens
IQVWHAEHR

SEQ ID NO: 11383 - protein, 13 aa, Homo sapiens
QLLTLSSELSQAR

SEQ ID NO: 11384 - protein, 9 aa, Homo sapiens
QRIDEFEAL

SEQ ID NO: 11385 - protein, 8 aa, Homo sapiens
SGYLSSER

SEQ ID NO: 11386 - protein, 12 aa, Homo sapiens
THNDIIHNENMR

SEQ ID NO: 11387 - protein, 12 aa, Homo sapiens
MKETAEAYLGKK

SEQ ID NO: 11388 - protein, 8 aa, Homo sapiens
NTVVPTKK

SEQ ID NO: 11389 - protein, 16 aa, Homo sapiens
KTKPYIQVDIGGGQTK

SEQ ID NO: 11390 - protein, 14 aa, Homo sapiens
KKELEEIVQPIISK

SEQ ID NO: 11391 - protein, 9 aa, Homo sapiens
VLEDSDLKK

SEQ ID NO: 11392 - protein, 8 aa, Homo sapiens
STMKPVQK

SEQ ID NO: 11393 - protein, 15 aa, Homo sapiens
KSDIDEIVLVGGSTR

SEQ ID NO: 11394 - protein, 10 aa, Homo sapiens
EFFNGKEPSR

SEQ ID NO: 11395 - protein, 16 aa, Homo sapiens
IEWLESHQDADIEDFK

SEQ ID NO: 11396 - protein, 8 aa, Homo sapiens
VLEDSDLK

SEQ ID NO: 11397 - protein, 18 aa, Homo sapiens
KVTHAVVTVPAYFNDAQR

SEQ ID NO: 11398 - protein, 12 aa, Homo sapiens
ELEEIVQPIISK

SEQ ID NO: 11399 - protein, 18 aa, Homo sapiens
IEWLESHQDADIEDFKAK

SEQ ID NO: 11400 - protein, 7 aa, Homo sapiens
VMEHFIK

SEQ ID NO: 11401 - protein, 18 aa, Homo sapiens
KSQIFSTASDNQPTVTIK

SEQ ID NO: 11402 - protein, 15 aa, Homo sapiens
TKPYIQVDIGGGQTK

SEQ ID NO: 11403 - protein, 14 aa, Homo sapiens
MVNDAEKFAEEDKK

SEQ ID NO: 11404 - protein, 11 aa, Homo sapiens
MKETAEAYLGK

SEQ ID NO: 11405 - protein, 21 aa, Homo sapiens
LYGSAGPPPTGEEDTAEKDEL

SEQ ID NO: 11406 - protein, 11 aa, Homo sapiens
NELESYAYSLK

SEQ ID NO: 11407 - protein, 14 aa, Homo sapiens
TFAPEEISAMVLTK

SEQ ID NO: 11408 - protein, 17 aa, Homo sapiens
IINEPTAAAIAYGLDKR

SEQ ID NO: 11409 - protein, 10 aa, Homo sapiens
VYEGERPLTK

SEQ ID NO: 11410 - protein, 12 aa, Homo sapiens
TWNDPSVQQDIK

SEQ ID NO: 11411 - protein, 12 aa, Homo sapiens
AKFEELNMDLFR

SEQ ID NO: 11412 - protein, 15 aa, Homo sapiens
NQLTSNPENTVFDAK

SEQ ID NO: 11413 - protein, 17 aa, Homo sapiens
SQIFSTASDNQPTVTIK

SEQ ID NO: 11414 - protein, 12 aa, Homo sapiens
DAGTIAGLNVMR

SEQ ID NO: 11415 - protein, 18 aa, Homo sapiens
DNHLLGTFDLTGIPPAPR

SEQ ID NO: 11416 - protein, 7 aa, Homo sapiens
FAEEDKK

SEQ ID NO: 11417 - protein, 10 aa, Homo sapiens
FEELNMDLFR

SEQ ID NO: 11418 - protein, 18 aa, Homo sapiens
IEIESFYEGEDFSETLTR

SEQ ID NO: 11419 - protein, 9 aa, Homo sapiens
ITITNDQNR

SEQ ID NO: 11420 - protein, 14 aa, Homo sapiens
ITPSYVAFTPEGER

SEQ ID NO: 11421 - protein, 14 aa, Homo sapiens
SDIDEIVLVGGSTR

SEQ ID NO: 11422 - protein, 17 aa, Homo sapiens
VTHAVVTVPAYFNDAQR

SEQ ID NO: 11423 - protein, 11 aa, Homo sapiens
VIGTLLGTVDK

SEQ ID NO: 11424 - protein, 11 aa, Homo sapiens
FLMSLVNQVPK

SEQ ID NO: 11425 - protein, 7 aa, Homo sapiens
NMYELHK

SEQ ID NO: 11426 - protein, 8 aa, Homo sapiens
IGVDLIMK

SEQ ID NO: 11427 - protein, 19 aa, Homo sapiens
IQDALSTVLQYAEDVLSGK

SEQ ID NO: 11428 - protein, 12 aa, Homo sapiens
TMGVMFTPLTVK

SEQ ID NO: 11429 - protein, 12 aa, Homo sapiens
AYVSTLMGVPGR

SEQ ID NO: 11430 - protein, 18 aa, Homo sapiens
EAPNPIHLTVDTSLQNGR

SEQ ID NO: 11431 - protein, 15 aa, Homo sapiens
LHPVILASIVDSYER

SEQ ID NO: 11432 - protein, 7 aa, Homo sapiens
TCFSPNR

SEQ ID NO: 11433 - protein, 17 aa, Homo sapiens
VIGLSSDLQQVGGASAR

SEQ ID NO: 11434 - protein, 9 aa, Homo sapiens
VSADNTVGR

SEQ ID NO: 11435 - protein, 8 aa, Homo sapiens
YAYYDTER

SEQ ID NO: 11436 - protein, 11 aa, Homo sapiens
LGSPDEEFFHK

SEQ ID NO: 11437 - protein, 19 aa, Homo sapiens
AIEPQKEEADENYNSVNTR

SEQ ID NO: 11438 - protein, 16 aa, Homo sapiens
QQVTILATPLPEESMK

SEQ ID NO: 11439 - protein, 9 aa, Homo sapiens
CNSMQSEYR

SEQ ID NO: 11440 - protein, 9 aa, Homo sapiens
HSEIQQLER

SEQ ID NO: 11441 - protein, 11 aa, Homo sapiens
NILSSADYVER

SEQ ID NO: 11442 - protein, 9 aa, Homo sapiens
QALNEISAR

SEQ ID NO: 11443 - protein, 11 aa, Homo sapiens
VALVVHPGTAR

SEQ ID NO: 11444 - protein, 18 aa, Homo sapiens
NQTAEKEEFEHQQKELEK

SEQ ID NO: 11445 - protein, 24 aa, Homo sapiens
CNEIINWLDKNQTAEKEEFEHQQK

SEQ ID NO: 11446 - protein, 7 aa, Homo sapiens
STGKENK

SEQ ID NO: 11447 - protein, 7 aa, Homo sapiens
AEDEKQR

SEQ ID NO: 11448 - protein, 11 aa, Homo sapiens
MVNHFIAEFKR

SEQ ID NO: 11449 - protein, 14 aa, Homo sapiens
ILDKCNEIINWLDK

SEQ ID NO: 11450 - protein, 8 aa, Homo sapiens
LSKEDIER

SEQ ID NO: 11451 - protein, 7 aa, Homo sapiens
ITITNDK

SEQ ID NO: 11452 - protein, 9 aa, Homo sapiens
EIAEAYLGK

SEQ ID NO: 11453 - protein, 11 aa, Homo sapiens
FDDAVVQSDMK

SEQ ID NO: 11454 - protein, 10 aa, Homo sapiens
VQVEYKGETK

SEQ ID NO: 11455 - protein, 17 aa, Homo sapiens
LDKSQIHDIVLVGGSTR

SEQ ID NO: 11456 - protein, 22 aa, Homo sapiens
GPAVGIDLGTTYSCVGVFQHGK

SEQ ID NO: 11457 - protein, 7 aa, Homo sapiens
DNNLLGK

SEQ ID NO: 11458 - protein, 14 aa, Homo sapiens
NQTAEKEEFEHQQK

SEQ ID NO: 11459 - protein, 11 aa, Homo sapiens
MKEIAEAYLGK

SEQ ID NO: 11460 - protein, 10 aa, Homo sapiens
CNEIINWLDK

SEQ ID NO: 11461 - protein, 16 aa, Homo sapiens
QATKDAGTIAGLNVLR

SEQ ID NO: 11462 - protein, 14 aa, Homo sapiens
HWPFMVVNDAGRPK

SEQ ID NO: 11463 - protein, 14 aa, Homo sapiens
SFYPEEVSSMVLTK

SEQ ID NO: 11464 - protein, 9 aa, Homo sapiens
LLQDFFNGK

SEQ ID NO: 11465 - protein, 17 aa, Homo sapiens
IINEPTAAAIAYGLDKK

SEQ ID NO: 11466 - protein, 12 aa, Homo sapiens
RFDDAVVQSDMK

SEQ ID NO: 11467 - protein, 16 aa, Homo sapiens
IINEPTAAAIAYGLDK

SEQ ID NO: 11468 - protein, 23 aa, Homo sapiens
SINPDEAVAYGAAVQAAILSGDK

SEQ ID NO: 11469 - protein, 10 aa, Homo sapiens
MVNHFIAEFK

SEQ ID NO: 11470 - protein, 15 aa, Homo sapiens
NQVAMNPTNTVFDAK

SEQ ID NO: 11471 - protein, 8 aa, Homo sapiens
VCNPIITK

SEQ ID NO: 11472 - protein, 11 aa, Homo sapiens
NSLESYAFNMK

SEQ ID NO: 11473 - protein, 8 aa, Homo sapiens
GTLDPVEK

SEQ ID NO: 11474 - protein, 12 aa, Homo sapiens
ARFEELNADLFR

SEQ ID NO: 11475 - protein, 12 aa, Homo sapiens
DAGTIAGLNVLR

SEQ ID NO: 11476 - protein, 10 aa, Homo sapiens
FEELNADLFR

SEQ ID NO: 11477 - protein, 11 aa, Homo sapiens
FELTGIPPAPR

SEQ ID NO: 11478 - protein, 12 aa, Homo sapiens
HWPFMVVNDAGR

SEQ ID NO: 11479 - protein, 9 aa, Homo sapiens
ITITNDKGR

SEQ ID NO: 11480 - protein, 24 aa, Homo sapiens
QTQTFTTYSDNQPGVLIQVYEGER

SEQ ID NO: 11481 - protein, 14 aa, Homo sapiens
SQIHDIVLVGGSTR

SEQ ID NO: 11482 - protein, 16 aa, Homo sapiens
STAGDTHLGGEDFDNR

SEQ ID NO: 11483 - protein, 13 aa, Homo sapiens
TTPSYVAFTDTER

SEQ ID NO: 11484 - protein, 18 aa, Homo sapiens
TVTNAVVTVPAYFNDSQR

SEQ ID NO: 11485 - protein, 9 aa, Homo sapiens
LGFGSFVDK

SEQ ID NO: 11486 - protein, 14 aa, Homo sapiens
WADPQISESNFSPK

SEQ ID NO: 11487 - protein, 10 aa, Homo sapiens
LYASHSQFIK

SEQ ID NO: 11488 - protein, 12 aa, Homo sapiens
EFGEEALNSLQK

SEQ ID NO: 11489 - protein, 13 aa, Homo sapiens
WGPNHAADPIITR

SEQ ID NO: 11490 - protein, 16 aa, Homo sapiens
AMKDEEKMELQEMQLK

SEQ ID NO: 11491 - protein, 9 aa, Homo sapiens
MELQEMQLK

SEQ ID NO: 11492 - protein, 17 aa, Homo sapiens
LKPEDITQIQPQQLVLR

SEQ ID NO: 11493 - protein, 10 aa, Homo sapiens
WDTGENPIYK

SEQ ID NO: 11494 - protein, 11 aa, Homo sapiens
SLGTDLMNEMR

SEQ ID NO: 11495 - protein, 10 aa, Homo sapiens
VQAGAYPTEK

SEQ ID NO: 11496 - protein, 14 aa, Homo sapiens
ELKEQYSDAPEEIR

SEQ ID NO: 11497 - protein, 18 aa, Homo sapiens
AALGVLESDLPSAVTLLK

SEQ ID NO: 11498 - protein, 14 aa, Homo sapiens
ASGGSLQGHDAVLR

SEQ ID NO: 11499 - protein, 11 aa, Homo sapiens
EQYSDAPEEIR

SEQ ID NO: 11500 - protein, 10 aa, Homo sapiens
INYEESMMVR

SEQ ID NO: 11501 - protein, 13 aa, Homo sapiens
LVPVHYDETEAER

SEQ ID NO: 11502 - protein, 14 aa, Homo sapiens
TAVTGSLSENDPLR

SEQ ID NO: 11503 - protein, 14 aa, Homo sapiens
IQQIETTLNILDAK

SEQ ID NO: 11504 - protein, 12 aa, Homo sapiens
MVQVGVPVMAIR

SEQ ID NO: 11505 - protein, 17 aa, Homo sapiens
NGKPVTTGVSETVFLPR

SEQ ID NO: 11506 - protein, 12 aa, Homo sapiens
VEHWGLDEPLLK

SEQ ID NO: 11507 - protein, 18 aa, Homo sapiens
KFHYLPFLPSTEDVYDCR

SEQ ID NO: 11508 - protein, 17 aa, Homo sapiens
FASFEAQGALANIAVDK

SEQ ID NO: 11509 - protein, 8 aa, Homo sapiens
ANLEIMTK

SEQ ID NO: 11510 - protein, 11 aa, Homo sapiens
EPNVLICFIDK

SEQ ID NO: 11511 - protein, 17 aa, Homo sapiens
FHYLPFLPSTEDVYDCR

SEQ ID NO: 11512 - protein, 7 aa, Homo sapiens
NHIQLVK

SEQ ID NO: 11513 - protein, 8 aa, Homo sapiens
QYTSLLGK

SEQ ID NO: 11514 - protein, 12 aa, Homo sapiens
AESEQEAYLRED

SEQ ID NO: 11515 - protein, 10 aa, Homo sapiens
AVYTLTSLYR

SEQ ID NO: 11516 - protein, 10 aa, Homo sapiens
LAEAQIEELR

SEQ ID NO: 11517 - protein, 11 aa, Homo sapiens
LQVEEVHQLSR

SEQ ID NO: 11518 - protein, 17 aa, Homo sapiens
MNSEEEDEVWQVIIGAR

SEQ ID NO: 11519 - protein, 13 aa, Homo sapiens
SEPHSLSSEALMR

SEQ ID NO: 11520 - protein, 20 aa, Homo sapiens
TQEEGEERAESEQEAYLRED

SEQ ID NO: 11521 - protein, 8 aa, Homo sapiens
CGLVLSWK

SEQ ID NO: 11522 - protein, 14 aa, Homo sapiens
FPVAPLIPYPLITK

SEQ ID NO: 11523 - protein, 16 aa, Homo sapiens
KLVPLDYGEDDKNATK

SEQ ID NO: 11524 - protein, 7 aa, Homo sapiens
IRPWINK

SEQ ID NO: 11525 - protein, 7 aa, Homo sapiens
AQLDEWK

SEQ ID NO: 11526 - protein, 16 aa, Homo sapiens
LKEFLEDYDDDRDDPK

SEQ ID NO: 11527 - protein, 9 aa, Homo sapiens
EKEELEEIR

SEQ ID NO: 11528 - protein, 15 aa, Homo sapiens
RFPVAPLIPYPLITK

SEQ ID NO: 11529 - protein, 21 aa, Homo sapiens
KLPVDSVFNKFEDEDSDDVPR

SEQ ID NO: 11530 - protein, 14 aa, Homo sapiens
EFLEDYDDDRDDPK

SEQ ID NO: 11531 - protein, 13 aa, Homo sapiens
EDINAIEMEEDKR

SEQ ID NO: 11532 - protein, 10 aa, Homo sapiens
LLHDLQIGEK

SEQ ID NO: 11533 - protein, 9 aa, Homo sapiens
LLIYETEAK

SEQ ID NO: 11534 - protein, 17 aa, Homo sapiens
LQAFGFCEYKEPESTLR

SEQ ID NO: 11535 - protein, 7 aa, Homo sapiens
LKNWEIR

SEQ ID NO: 11536 - protein, 7 aa, Homo sapiens
ASDMLIR

SEQ ID NO: 11537 - protein, 12 aa, Homo sapiens
DREEDEEDAYER

SEQ ID NO: 11538 - protein, 13 aa, Homo sapiens
DREEDEEDAYERR

SEQ ID NO: 11539 - protein, 18 aa, Homo sapiens
EYSSELNAPSQESDSHPR

SEQ ID NO: 11540 - protein, 15 aa, Homo sapiens
LLAEGHPDPDAELQR

SEQ ID NO: 11541 - protein, 8 aa, Homo sapiens
FAEYGEIK

SEQ ID NO: 11542 - protein, 26 aa, Homo sapiens
ADVLDLHEAGGEDFAMDEDGDESIHK

SEQ ID NO: 11543 - protein, 24 aa, Homo sapiens
SVEGWILFVTGVHEEATEEDIHDK

SEQ ID NO: 11544 - protein, 11 aa, Homo sapiens
GYTLVEYETYK

SEQ ID NO: 11545 - protein, 17 aa, Homo sapiens
EDYDSVEQDGDEPGPQR

SEQ ID NO: 11546 - protein, 9 aa, Homo sapiens
GFGSEEGSR

SEQ ID NO: 11547 - protein, 11 aa, Homo sapiens
GRGFGSEEGSR

SEQ ID NO: 11548 - protein, 19 aa, Homo sapiens
MREDYDSVEQDGDEPGPQR

SEQ ID NO: 11549 - protein, 8 aa, Homo sapiens
NIHLNLDR

SEQ ID NO: 11550 - protein, 9 aa, Homo sapiens
NIHLNLDRR

SEQ ID NO: 11551 - protein, 10 aa, Homo sapiens
NVEMFMTIEK

SEQ ID NO: 11552 - protein, 28 aa, Homo sapiens
WILDTDTFNEWMNEEDYEVNDDKNPVSR

SEQ ID NO: 11553 - protein, 13 aa, Homo sapiens
RGHREEEQEDLTK

SEQ ID NO: 11554 - protein, 17 aa, Homo sapiens
EGQEEVLKEVVESEGER

SEQ ID NO: 11555 - protein, 17 aa, Homo sapiens
TPQQTSASQQMLNFPDK

SEQ ID NO: 11556 - protein, 28 aa, Homo sapiens
PTPMGPPPTSHFHVLADTPSGLVPLQPK

SEQ ID NO: 11557 - protein, 8 aa, Homo sapiens
SALEEFSK

SEQ ID NO: 11558 - protein, 13 aa, Homo sapiens
EGGGAIEEEAKEK

SEQ ID NO: 11559 - protein, 9 aa, Homo sapiens
KGPSTPYTK

SEQ ID NO: 11560 - protein, 15 aa, Homo sapiens
MKEEVPTALVEAHVR

SEQ ID NO: 11561 - protein, 12 aa, Homo sapiens
EKPTDMQNFGLR

SEQ ID NO: 11562 - protein, 14 aa, Homo sapiens
AGGSLCHILAAAYK

SEQ ID NO: 11563 - protein, 12 aa, Homo sapiens
PNIFLCPEIEPK

SEQ ID NO: 11564 - protein, 12 aa, Homo sapiens
GHREEEQEDLTK

SEQ ID NO: 11565 - protein, 25 aa, Homo sapiens
NNASHVVYPVPGNLEEEEWVRPVMK

SEQ ID NO: 11566 - protein, 10 aa, Homo sapiens
YIQAEPPTNK

SEQ ID NO: 11567 - protein, 21 aa, Homo sapiens
DIGEGNLSTAAAAALAAAAVK

SEQ ID NO: 11568 - protein, 10 aa, Homo sapiens
EVVESEGERK

SEQ ID NO: 11569 - protein, 12 aa, Homo sapiens
SLVALLVETQMK

SEQ ID NO: 11570 - protein, 18 aa, Homo sapiens
DMDEPSPVPNVEEVTLPK

SEQ ID NO: 11571 - protein, 32 aa, Homo sapiens
ADPAFGLESSGIAGTTSDEPERIEESGNDEAR

SEQ ID NO: 11572 - protein, 11 aa, Homo sapiens
HFEELETIMDR

SEQ ID NO: 11573 - protein, 8 aa, Homo sapiens
HLAAVEER

SEQ ID NO: 11574 - protein, 13 aa, Homo sapiens
LNPQEYLTSTACR

SEQ ID NO: 11575 - protein, 8 aa, Homo sapiens
NFMIDTYR

SEQ ID NO: 11576 - protein, 11 aa, Homo sapiens
NLAGDVCAIMR

SEQ ID NO: 11577 - protein, 10 aa, Homo sapiens
SLVQNNCLSR

SEQ ID NO: 11578 - protein, 14 aa, Homo sapiens
TLTDEVNSPDSDRR

SEQ ID NO: 11579 - protein, 9 aa, Homo sapiens
TPEIYLAYR

SEQ ID NO: 11580 - protein, 11 aa, Homo sapiens
TQDECILHFLR

SEQ ID NO: 11581 - protein, 15 aa, Homo sapiens
YYEAADTVTQFDNVR

SEQ ID NO: 11582 - protein, 12 aa, Homo sapiens
KFGDPVVQSDMK

SEQ ID NO: 11583 - protein, 11 aa, Homo sapiens
LVNHFVEEFKR

SEQ ID NO: 11584 - protein, 11 aa, Homo sapiens
NALESYAFNMK

SEQ ID NO: 11585 - protein, 15 aa, Homo sapiens
NQVALNPQNTVFDAK

SEQ ID NO: 11586 - protein, 9 aa, Homo sapiens
SAVEDEGLK

SEQ ID NO: 11587 - protein, 14 aa, Homo sapiens
HWPFQVINDGDKPK

SEQ ID NO: 11588 - protein, 10 aa, Homo sapiens
LVNHFVEEFK

SEQ ID NO: 11589 - protein, 31 aa, Homo sapiens
ELEQVCNPIISGLYQGAGGPGPGGFGAQGPK

SEQ ID NO: 11590 - protein, 14 aa, Homo sapiens
AFYPEEISSMVLTK

SEQ ID NO: 11591 - protein, 12 aa, Homo sapiens
ARFEELCSDLFR

SEQ ID NO: 11592 - protein, 16 aa, Homo sapiens
ATAGDTHLGGEDFDNR

SEQ ID NO: 11593 - protein, 12 aa, Homo sapiens
DAGVIAGLNVLR

SEQ ID NO: 11594 - protein, 10 aa, Homo sapiens
FEELCSDLFR

SEQ ID NO: 11595 - protein, 16 aa, Homo sapiens
IINEPTAAAIAYGLDR

SEQ ID NO: 11596 - protein, 17 aa, Homo sapiens
YHPDKNPDNPEAADKFK

SEQ ID NO: 11597 - protein, 15 aa, Homo sapiens
YHPDKNPDNPEAADK

SEQ ID NO: 11598 - protein, 14 aa, Homo sapiens
EINNAHAILTDATK

SEQ ID NO: 11599 - protein, 25 aa, Homo sapiens
APEGEETEFYVSPEDLEAQLQSDER

SEQ ID NO: 11600 - protein, 24 aa, Homo sapiens
TDHPEIGEGKPTPALSEASSSSIR

SEQ ID NO: 11601 - protein, 21 aa, Homo sapiens
ILGSASPEEEQEKPILDRPTR

SEQ ID NO: 11602 - protein, 12 aa, Homo sapiens
QPLGPDGSQGFK

SEQ ID NO: 11603 - protein, 8 aa, Homo sapiens
EAEYAEAR

SEQ ID NO: 11604 - protein, 8 aa, Homo sapiens
ISQPEDSR

SEQ ID NO: 11605 - protein, 19 aa, Homo sapiens
VPIVIQDDSLPAGPPPQIR

SEQ ID NO: 11606 - protein, 24 aa, Homo sapiens
VGDSTPVSEKPVSAAVDANASESP

SEQ ID NO: 11607 - protein, 17 aa, Homo sapiens
ADAASSLTVDVTPPTAK

SEQ ID NO: 11608 - protein, 16 aa, Homo sapiens
ISLPGQMAGTPITPLK

SEQ ID NO: 11609 - protein, 21 aa, Homo sapiens
ETSVTPSNLWGGQGLLGVSIR

SEQ ID NO: 11610 - protein, 27 aa, Homo sapiens
EVIITPNSAWGGEGSLGCGIGYGYLHR

SEQ ID NO: 11611 - protein, 12 aa, Homo sapiens
LYVYNTDTDNCR

SEQ ID NO: 11612 - protein, 15 aa, Homo sapiens
LGETDEEKLFVETGK

SEQ ID NO: 11613 - protein, 19 aa, Homo sapiens
SEHLSVRPQTALEENETQK

SEQ ID NO: 11614 - protein, 16 aa, Homo sapiens
EVPQDQHLEAPADQSK

SEQ ID NO: 11615 - protein, 20 aa, Homo sapiens
KSEHLSVRPQTALEENETQK

SEQ ID NO: 11616 - protein, 14 aa, Homo sapiens
AKAPIQDIWYHEDR

SEQ ID NO: 11617 - protein, 10 aa, Homo sapiens
AFDLFNPNFK

SEQ ID NO: 11618 - protein, 10 aa, Homo sapiens
ALLAEGVILR

SEQ ID NO: 11619 - protein, 12 aa, Homo sapiens
APIQDIWYHEDR

SEQ ID NO: 11620 - protein, 10 aa, Homo sapiens
FYSVYGSGQR

SEQ ID NO: 11621 - protein, 10 aa, Homo sapiens
LETVGSIFSR

SEQ ID NO: 11622 - protein, 14 aa, Homo sapiens
YLLVPAFQGALTMK

SEQ ID NO: 11623 - protein, 10 aa, Homo sapiens
AAEDELQLPR

SEQ ID NO: 11624 - protein, 13 aa, Homo sapiens
AAEMLSQLDLFSR

SEQ ID NO: 11625 - protein, 16 aa, Homo sapiens
QLLDEVEVATEPAGSR

SEQ ID NO: 11626 - protein, 12 aa, Homo sapiens
SAVESGQADDER

SEQ ID NO: 11627 - protein, 9 aa, Homo sapiens
KNYNWAITR

SEQ ID NO: 11628 - protein, 12 aa, Homo sapiens
EREVLQLQEEVK

SEQ ID NO: 11629 - protein, 10 aa, Homo sapiens
EVLQLQEEVK

SEQ ID NO: 11630 - protein, 11 aa, Homo sapiens
KAEEVQAWAQR

SEQ ID NO: 11631 - protein, 7 aa, Homo sapiens
AGVLAER

SEQ ID NO: 11632 - protein, 11 aa, Homo sapiens
ELMAWNQAENR

SEQ ID NO: 11633 - protein, 9 aa, Homo sapiens
MEFVSEVQR

SEQ ID NO: 11634 - protein, 8 aa, Homo sapiens
VEAALDSR

SEQ ID NO: 11635 - protein, 18 aa, Homo sapiens
VNMPPAVDPAEFFVLMER

SEQ ID NO: 11636 - protein, 18 aa, Homo sapiens
AEEEQAGSAPGAGGTATK

SEQ ID NO: 11637 - protein, 14 aa, Homo sapiens
KKAEPSEVDMNSPK

SEQ ID NO: 11638 - protein, 13 aa, Homo sapiens
KKEEPSQNDISPK

SEQ ID NO: 11639 - protein, 8 aa, Homo sapiens
DFSDITKK

SEQ ID NO: 11640 - protein, 9 aa, Homo sapiens
TFHHVYSGK

SEQ ID NO: 11641 - protein, 17 aa, Homo sapiens
SDKTEEIAEEEETVFPK

SEQ ID NO: 11642 - protein, 17 aa, Homo sapiens
GLDIPEVDLVIQSSPPK

SEQ ID NO: 11643 - protein, 15 aa, Homo sapiens
NEEPSEEEIDAPKPK

SEQ ID NO: 11644 - protein, 24 aa, Homo sapiens
DSEDNPQTLLFSATCPHWVFNVAK

SEQ ID NO: 11645 - protein, 11 aa, Homo sapiens
EEYQLVQVEQK

SEQ ID NO: 11646 - protein, 11 aa, Homo sapiens
STYEQVDLIGK

SEQ ID NO: 11647 - protein, 12 aa, Homo sapiens
SDAGLESDTAMK

SEQ ID NO: 11648 - protein, 12 aa, Homo sapiens
STYEQVDLIGKK

SEQ ID NO: 11649 - protein, 11 aa, Homo sapiens
TFSFAIPLIEK

SEQ ID NO: 11650 - protein, 13 aa, Homo sapiens
QDAQSLHGDIPQK

SEQ ID NO: 11651 - protein, 11 aa, Homo sapiens
GVTFLFPIQAK

SEQ ID NO: 11652 - protein, 15 aa, Homo sapiens
EGAFSNFPISEETIK

SEQ ID NO: 11653 - protein, 12 aa, Homo sapiens
EAQELSQNSAIK

SEQ ID NO: 11654 - protein, 10 aa, Homo sapiens
EQLGEEIDSK

SEQ ID NO: 11655 - protein, 11 aa, Homo sapiens
TAITVEHLAIK

SEQ ID NO: 11656 - protein, 18 aa, Homo sapiens
LGVCFDVPTASVTEIQEK

SEQ ID NO: 11657 - protein, 11 aa, Homo sapiens
IGVPSATEIIK

SEQ ID NO: 11658 - protein, 19 aa, Homo sapiens
KLSVACFYGGTPYGGQFER

SEQ ID NO: 11659 - protein, 25 aa, Homo sapiens
KDSEDNPQTLLFSATCPHWVFNVAK

SEQ ID NO: 11660 - protein, 9 aa, Homo sapiens
AAVIGDVIR

SEQ ID NO: 11661 - protein, 11 aa, Homo sapiens
APQVLVLAPTR

SEQ ID NO: 11662 - protein, 8 aa, Homo sapiens
DVESYIHR

SEQ ID NO: 11663 - protein, 22 aa, Homo sapiens
GAVEALAAALAHISGATSVDQR

SEQ ID NO: 11664 - protein, 13 aa, Homo sapiens
GRAPQVLVLAPTR

SEQ ID NO: 11665 - protein, 8 aa, Homo sapiens
LHGELQDR

SEQ ID NO: 11666 - protein, 18 aa, Homo sapiens
LSVACFYGGTPYGGQFER

SEQ ID NO: 11667 - protein, 12 aa, Homo sapiens
NGIDILVGTPGR

SEQ ID NO: 11668 - protein, 16 aa, Homo sapiens
WQLSVATEQPELEGPR

SEQ ID NO: 11669 - protein, 13 aa, Homo sapiens
AIEINPDSAQPYK

SEQ ID NO: 11670 - protein, 9 aa, Homo sapiens
LQKPNAAIR

SEQ ID NO: 11671 - protein, 12 aa, Homo sapiens
LDYDEDASAMLK

SEQ ID NO: 11672 - protein, 17 aa, Homo sapiens
LLGHWEEAAHDLALACK

SEQ ID NO: 11673 - protein, 7 aa, Homo sapiens
VMNLISK

SEQ ID NO: 11674 - protein, 7 aa, Homo sapiens
LAILYAK

SEQ ID NO: 11675 - protein, 10 aa, Homo sapiens
AIDLFTDAIK

SEQ ID NO: 11676 - protein, 14 aa, Homo sapiens
VAAIEALNDGELQK

SEQ ID NO: 11677 - protein, 12 aa, Homo sapiens
QDPSVLHTEEMR

SEQ ID NO: 11678 - protein, 10 aa, Homo sapiens
NAMKNLWCEK

SEQ ID NO: 11679 - protein, 11 aa, Homo sapiens
IEGTPLETIQK

SEQ ID NO: 11680 - protein, 10 aa, Homo sapiens
SVSFSDVFFK

SEQ ID NO: 11681 - protein, 12 aa, Homo sapiens
IEGTPLETIQKK

SEQ ID NO: 11682 - protein, 7 aa, Homo sapiens
MELPDYR

SEQ ID NO: 11683 - protein, 12 aa, Homo sapiens
VYDEEVEEPVLK

SEQ ID NO: 11684 - protein, 18 aa, Homo sapiens
SIFDDDMDDIFSSGIQAK

SEQ ID NO: 11685 - protein, 16 aa, Homo sapiens
AVASPEATVSQTDENK

SEQ ID NO: 11686 - protein, 17 aa, Homo sapiens
VQSTADIFGDEEGDLFK

SEQ ID NO: 11687 - protein, 20 aa, Homo sapiens
LTDEDFSPFGSGGGLFSGGK

SEQ ID NO: 11688 - protein, 13 aa, Homo sapiens
HSDLFSSSSPWDK

SEQ ID NO: 11689 - protein, 13 aa, Homo sapiens
IAENPANPPVGGK

SEQ ID NO: 11690 - protein, 15 aa, Homo sapiens
STGVFQDEELLFSHK

SEQ ID NO: 11691 - protein, 11 aa, Homo sapiens
EPQKPEQPTPR

SEQ ID NO: 11692 - protein, 15 aa, Homo sapiens
DLYIDRPLPYLIGSK

SEQ ID NO: 11693 - protein, 11 aa, Homo sapiens
DSGTLQSQEAK

SEQ ID NO: 11694 - protein, 23 aa, Homo sapiens
GEADLFDSGDIFSTGTGSQSVER

SEQ ID NO: 11695 - protein, 20 aa, Homo sapiens
GLFDDEDEESDLFTEAPQDR

SEQ ID NO: 11696 - protein, 16 aa, Homo sapiens
LAAQESSETEDMSVPR

SEQ ID NO: 11697 - protein, 9 aa, Homo sapiens
QTLCLQAQR

SEQ ID NO: 11698 - protein, 15 aa, Homo sapiens
VSNIFDDPLNAFGGQ

SEQ ID NO: 11699 - protein, 19 aa, Homo sapiens
VLSLETSVNELNSQLNESK

SEQ ID NO: 11700 - protein, 18 aa, Homo sapiens
LELNSMQEQLIQAQNTLK

SEQ ID NO: 11701 - protein, 17 aa, Homo sapiens
ADLQNHLDTAQNALQDK

SEQ ID NO: 11702 - protein, 9 aa, Homo sapiens
NIQATLHQK

SEQ ID NO: 11703 - protein, 11 aa, Homo sapiens
EALMTELSTVK

SEQ ID NO: 11704 - protein, 10 aa, Homo sapiens
SLGSADELFK

SEQ ID NO: 11705 - protein, 11 aa, Homo sapiens
ITTQLDQVTAK

SEQ ID NO: 11706 - protein, 11 aa, Homo sapiens
LKEELSEVETK

SEQ ID NO: 11707 - protein, 10 aa, Homo sapiens
IQNLEALLQK

SEQ ID NO: 11708 - protein, 14 aa, Homo sapiens
KLDNTTAAVQELGR

SEQ ID NO: 11709 - protein, 10 aa, Homo sapiens
IQTTVTELQK

SEQ ID NO: 11710 - protein, 16 aa, Homo sapiens
LQQQLTQAAQELAAEK

SEQ ID NO: 11711 - protein, 17 aa, Homo sapiens
IQAGEGETAVLNQLQEK

SEQ ID NO: 11712 - protein, 13 aa, Homo sapiens
VTNSTELQHQLDK

SEQ ID NO: 11713 - protein, 14 aa, Homo sapiens
NHTLQEQVTQLTEK

SEQ ID NO: 11714 - protein, 16 aa, Homo sapiens
ELVQVQTLMDNMTLER

SEQ ID NO: 11715 - protein, 16 aa, Homo sapiens
LQSQYASSEATISQLR

SEQ ID NO: 11716 - protein, 10 aa, Homo sapiens
LSASETSLHR

SEQ ID NO: 11717 - protein, 12 aa, Homo sapiens
LSLAQEDLISNR

SEQ ID NO: 11718 - protein, 9 aa, Homo sapiens
QLQSDFYGR

SEQ ID NO: 11719 - protein, 8 aa, Homo sapiens
LPEFSFEK

SEQ ID NO: 11720 - protein, 25 aa, Homo sapiens
NLSPTPASPNQGPPPQVPVSPGPPK

SEQ ID NO: 11721 - protein, 23 aa, Homo sapiens
HLGSPATSVPGMGLHPPGPPLAR

SEQ ID NO: 11722 - protein, 13 aa, Homo sapiens
IVEYLVGDGPQNR

SEQ ID NO: 11723 - protein, 14 aa, Homo sapiens
GFAFVYFENVDDAK

SEQ ID NO: 11724 - protein, 7 aa, Homo sapiens
VDFSITK

SEQ ID NO: 11725 - protein, 9 aa, Homo sapiens
IRVDFSITK

SEQ ID NO: 11726 - protein, 10 aa, Homo sapiens
AAQDRDQIYR

SEQ ID NO: 11727 - protein, 9 aa, Homo sapiens
ANGMELDGR

SEQ ID NO: 11728 - protein, 21 aa, Homo sapiens
ANPDPNCCLGVFGLSLYTTER

SEQ ID NO: 11729 - protein, 10 aa, Homo sapiens
GYDDRDYYSR

SEQ ID NO: 11730 - protein, 13 aa, Homo sapiens
RPHTPTPGIYMGR

SEQ ID NO: 11731 - protein, 16 aa, Homo sapiens
YGPIADVSIVYDQQSR

SEQ ID NO: 11732 - protein, 15 aa, Homo sapiens
QYEQQTYQVIPEVIK

SEQ ID NO: 11733 - protein, 14 aa, Homo sapiens
VYEIQDIYENSWTK

SEQ ID NO: 11734 - protein, 13 aa, Homo sapiens
LAGFLDLTEQEFR

SEQ ID NO: 11735 - protein, 20 aa, Homo sapiens
QLEVYTSGGDPESVAGEYGR

SEQ ID NO: 11736 - protein, 24 aa, Homo sapiens
VFSDEVQQQAQLSTIRVYELQASR

SEQ ID NO: 11737 - protein, 8 aa, Homo sapiens
SSELQAIK

SEQ ID NO: 11738 - protein, 12 aa, Homo sapiens
VFIGNLNTALVK

SEQ ID NO: 11739 - protein, 21 aa, Homo sapiens
VLAGQTLDINMAGEPKPDRPK

SEQ ID NO: 11740 - protein, 9 aa, Homo sapiens
LQASNVTNK

SEQ ID NO: 11741 - protein, 10 aa, Homo sapiens
KSDVETIFSK

SEQ ID NO: 11742 - protein, 9 aa, Homo sapiens
SDVETIFSK

SEQ ID NO: 11743 - protein, 7 aa, Homo sapiens
TELTQIK

SEQ ID NO: 11744 - protein, 16 aa, Homo sapiens
VLAGQTLDINMAGEPK

SEQ ID NO: 11745 - protein, 9 aa, Homo sapiens
LEQIAAEQK

SEQ ID NO: 11746 - protein, 13 aa, Homo sapiens
LQASNVTNKNDPK

SEQ ID NO: 11747 - protein, 9 aa, Homo sapiens
AAVLGENGR

SEQ ID NO: 11748 - protein, 11 aa, Homo sapiens
GYAFVQYSNER

SEQ ID NO: 11749 - protein, 9 aa, Homo sapiens
SNIDALLSR

SEQ ID NO: 11750 - protein, 32 aa, Homo sapiens
TRDDGDEEGLLTHSEEELEHSQDTDADDGALQ

SEQ ID NO: 11751 - protein, 7 aa, Homo sapiens
VTVPLVR

SEQ ID NO: 11752 - protein, 21 aa, Homo sapiens
SPSTTYLHTPTPSEDAAIPSK

SEQ ID NO: 11753 - protein, 22 aa, Homo sapiens
VLQQFAACFLETLPAQEEQTPK

SEQ ID NO: 11754 - protein, 8 aa, Homo sapiens
EHMVLAPR

SEQ ID NO: 11755 - protein, 20 aa, Homo sapiens
TSDVSQATLASVAPVFTVTK

SEQ ID NO: 11756 - protein, 14 aa, Homo sapiens
AVITPECLLILDYR

SEQ ID NO: 11757 - protein, 22 aa, Homo sapiens
ELPSQLSGEGQLVTYPLPFEFR

SEQ ID NO: 11758 - protein, 9 aa, Homo sapiens
QGNVTSFER

SEQ ID NO: 11759 - protein, 20 aa, Homo sapiens
SSAGIDHAEEMELLLENYYR

SEQ ID NO: 11760 - protein, 11 aa, Homo sapiens
ENLEEEAIIMK

SEQ ID NO: 11761 - protein, 17 aa, Homo sapiens
VKQDMPPPGGYGPIDYK

SEQ ID NO: 11762 - protein, 13 aa, Homo sapiens
IALLPLLQAETDR

SEQ ID NO: 11763 - protein, 14 aa, Homo sapiens
IALLPLLQAETDRR

SEQ ID NO: 11764 - protein, 9 aa, Homo sapiens
LQIEDFEAR

SEQ ID NO: 11765 - protein, 10 aa, Homo sapiens
VGESVFHTTR

SEQ ID NO: 11766 - protein, 13 aa, Homo sapiens
WVPPLIGELYGLR

SEQ ID NO: 11767 - protein, 12 aa, Homo sapiens
GRFEELSAWTEK

SEQ ID NO: 11768 - protein, 13 aa, Homo sapiens
ADLLGIVSELQLK

SEQ ID NO: 11769 - protein, 10 aa, Homo sapiens
LTVLQMTHNK

SEQ ID NO: 11770 - protein, 10 aa, Homo sapiens
LLQEHNNALK

SEQ ID NO: 11771 - protein, 10 aa, Homo sapiens
ELLTENHQLK

SEQ ID NO: 11772 - protein, 14 aa, Homo sapiens
AQMEVYCSDFHAER

SEQ ID NO: 11773 - protein, 15 aa, Homo sapiens
LNSSGSSEDSFVEIR

SEQ ID NO: 11774 - protein, 12 aa, Homo sapiens
QEEDLETMTILR

SEQ ID NO: 11775 - protein, 7 aa, Homo sapiens
TIEELTR

SEQ ID NO: 11776 - protein, 13 aa, Homo sapiens
TSDSDQQAYLVQR

SEQ ID NO: 11777 - protein, 23 aa, Homo sapiens
LFAQLAGDDMEVSATELMNILNK

SEQ ID NO: 11778 - protein, 13 aa, Homo sapiens
SMVAVMDSDTTGK

SEQ ID NO: 11779 - protein, 9 aa, Homo sapiens
MFLVNSFLK

SEQ ID NO: 11780 - protein, 7 aa, Homo sapiens
YLWNNIK

SEQ ID NO: 11781 - protein, 51 aa, Homo sapiens
GGGGGGGGGGGLGGGLGNVLGGLISGAGGGGGGGGGGGGGGGGGGGGTAMR

SEQ ID NO: 11782 - protein, 24 aa, Homo sapiens
ILGGVISAISEAAAQYNPEPPPPR

SEQ ID NO: 11783 - protein, 20 aa, Homo sapiens
RYSDESGNMDFDNFISCLVR

SEQ ID NO: 11784 - protein, 30 aa, Homo sapiens
SGTICSSELPGAFEAAGFHLNEHLYNMIIR

SEQ ID NO: 11785 - protein, 10 aa, Homo sapiens
TDGFGIDTCR

SEQ ID NO: 11786 - protein, 15 aa, Homo sapiens
THYSNIEANESEEVR

SEQ ID NO: 11787 - protein, 19 aa, Homo sapiens
YSDESGNMDFDNFISCLVR

SEQ ID NO: 11788 - protein, 20 aa, Homo sapiens
FQNYLAMDGFLLYELGDTGK

SEQ ID NO: 11789 - protein, 14 aa, Homo sapiens
KLEPIWNEVGLEMK

SEQ ID NO: 11790 - protein, 32 aa, Homo sapiens
SENENQEQIEESKEQQEPSSGGSVVPTVQEPK

SEQ ID NO: 11791 - protein, 13 aa, Homo sapiens
VFFVYVGGESPLK

SEQ ID NO: 11792 - protein, 11 aa, Homo sapiens
TKDDIIEFAHR

SEQ ID NO: 11793 - protein, 8 aa, Homo sapiens
STIVSIFK

SEQ ID NO: 11794 - protein, 8 aa, Homo sapiens
GDLAYNYR

SEQ ID NO: 11795 - protein, 16 aa, Homo sapiens
MDATSYSSIASEFGVR

SEQ ID NO: 11796 - protein, 8 aa, Homo sapiens
SIIQEVAR

SEQ ID NO: 11797 - protein, 7 aa, Homo sapiens
VSGALIR

SEQ ID NO: 11798 - protein, 9 aa, Homo sapiens
IFSQETLTK

SEQ ID NO: 11799 - protein, 16 aa, Homo sapiens
EKEDPEPSTDGTYVWK

SEQ ID NO: 11800 - protein, 11 aa, Homo sapiens
MHMWVEDVLDK

SEQ ID NO: 11801 - protein, 14 aa, Homo sapiens
KPWLAYPHYKPPEK

SEQ ID NO: 11802 - protein, 14 aa, Homo sapiens
SNLISGSVMYIEEK

SEQ ID NO: 11803 - protein, 16 aa, Homo sapiens
WNGHTDMIDQDGLYEK

SEQ ID NO: 11804 - protein, 8 aa, Homo sapiens
TLLETLQK

SEQ ID NO: 11805 - protein, 13 aa, Homo sapiens
YQSHDYAFSSVEK

SEQ ID NO: 11806 - protein, 11 aa, Homo sapiens
LVCSGLLQASK

SEQ ID NO: 11807 - protein, 11 aa, Homo sapiens
FLNEMIAPVMR

SEQ ID NO: 11808 - protein, 18 aa, Homo sapiens
IAIIGAGIGGTSAAYYLR

SEQ ID NO: 11809 - protein, 10 aa, Homo sapiens
LFLSYDYAVK

SEQ ID NO: 11810 - protein, 13 aa, Homo sapiens
MYEVVYQIGTETR

SEQ ID NO: 11811 - protein, 15 aa, Homo sapiens
SDFYDIVLVATPLNR

SEQ ID NO: 11812 - protein, 7 aa, Homo sapiens
YGFQSLR

SEQ ID NO: 11813 - protein, 16 aa, Homo sapiens
AITDGQAGFGNDTLSK

SEQ ID NO: 11814 - protein, 15 aa, Homo sapiens
VPGISSIEQGMTGLK

SEQ ID NO: 11815 - protein, 13 aa, Homo sapiens
LENNDNKPVTNSR

SEQ ID NO: 11816 - protein, 7 aa, Homo sapiens
LQLELSK

SEQ ID NO: 11817 - protein, 9 aa, Homo sapiens
KQLQDEMLR

SEQ ID NO: 11818 - protein, 12 aa, Homo sapiens
LQTMKEELDFQK

SEQ ID NO: 11819 - protein, 11 aa, Homo sapiens
LKDLEALLNSK

SEQ ID NO: 11820 - protein, 13 aa, Homo sapiens
SNEDQSMGNWQIK

SEQ ID NO: 11821 - protein, 11 aa, Homo sapiens
EAALSTALSEK

SEQ ID NO: 11822 - protein, 11 aa, Homo sapiens
VAVEEVDEEGK

SEQ ID NO: 11823 - protein, 13 aa, Homo sapiens
LQEKEDLQELNDR

SEQ ID NO: 11824 - protein, 12 aa, Homo sapiens
AQHEDQVEQYKK

SEQ ID NO: 11825 - protein, 15 aa, Homo sapiens
MQQQLDEYQELLDIK

SEQ ID NO: 11826 - protein, 9 aa, Homo sapiens
LEAALGEAK

SEQ ID NO: 11827 - protein, 25 aa, Homo sapiens
AGQVVTIWAAGAGATHSPPTDLVWK

SEQ ID NO: 11828 - protein, 11 aa, Homo sapiens
AAYEAELGDAR

SEQ ID NO: 11829 - protein, 12 aa, Homo sapiens
AQNTWGCGNSLR

SEQ ID NO: 11830 - protein, 27 aa, Homo sapiens
ASASGSGAQVGGPISSGSSASSVTVTR

SEQ ID NO: 11831 - protein, 8 aa, Homo sapiens
DLEDSLAR

SEQ ID NO: 11832 - protein, 10 aa, Homo sapiens
EGDLIAAQAR

SEQ ID NO: 11833 - protein, 10 aa, Homo sapiens
ITESEEVVSR

SEQ ID NO: 11834 - protein, 9 aa, Homo sapiens
LADALQELR

SEQ ID NO: 11835 - protein, 7 aa, Homo sapiens
LAVYIDR

SEQ ID NO: 11836 - protein, 10 aa, Homo sapiens
LRDLEDSLAR

SEQ ID NO: 11837 - protein, 9 aa, Homo sapiens
LSPSPTSQR

SEQ ID NO: 11838 - protein, 8 aa, Homo sapiens
NIYSEELR

SEQ ID NO: 11839 - protein, 16 aa, Homo sapiens
NSNLVGAAHEELQQSR

SEQ ID NO: 11840 - protein, 14 aa, Homo sapiens
SGAQASSTPLSPTR

SEQ ID NO: 11841 - protein, 17 aa, Homo sapiens
SVGGSGGGSFGDNLVTR

SEQ ID NO: 11842 - protein, 14 aa, Homo sapiens
TALINSTGEEVAMR

SEQ ID NO: 11843 - protein, 10 aa, Homo sapiens
TLEGELHDLR

SEQ ID NO: 11844 - protein, 23 aa, Homo sapiens
ETQAQPPDGDHSPGNHEQSYVGK

SEQ ID NO: 11845 - protein, 9 aa, Homo sapiens
GFSYLLAGR

SEQ ID NO: 11846 - protein, 13 aa, Homo sapiens
HPAATAQLETAVR

SEQ ID NO: 11847 - protein, 11 aa, Homo sapiens
TLQNTPSLHSR

SEQ ID NO: 11848 - protein, 7 aa, Homo sapiens
YQEYVTR

SEQ ID NO: 11849 - protein, 19 aa, Homo sapiens
AAPVTGGMGAVLMRKMGWR

SEQ ID NO: 11850 - protein, 10 aa, Homo sapiens
IMLVEPPVAK

SEQ ID NO: 11851 - protein, 16 aa, Homo sapiens
ATAATVVLQAMGLVPK

SEQ ID NO: 11852 - protein, 28 aa, Homo sapiens
LPEQPVDVPSEIADSSMTRPQELPELPK

SEQ ID NO: 11853 - protein, 18 aa, Homo sapiens
ILDSFAAAPVPTTTLVLK

SEQ ID NO: 11854 - protein, 9 aa, Homo sapiens
ATNIEQIFR

SEQ ID NO: 11855 - protein, 15 aa, Homo sapiens
FDSEPSAVALELPTR

SEQ ID NO: 11856 - protein, 7 aa, Homo sapiens
LGHDPYR

SEQ ID NO: 11857 - protein, 12 aa, Homo sapiens
SGGATIEELTEK

SEQ ID NO: 11858 - protein, 11 aa, Homo sapiens
SMMSSYSAADR

SEQ ID NO: 11859 - protein, 10 aa, Homo sapiens
SMMSSYTADR

SEQ ID NO: 11860 - protein, 14 aa, Homo sapiens
IEKIEDMDDNCYLK

SEQ ID NO: 11861 - protein, 13 aa, Homo sapiens
LQVLDPVPKPVIK

SEQ ID NO: 11862 - protein, 8 aa, Homo sapiens
IVEWDSRK

SEQ ID NO: 11863 - protein, 9 aa, Homo sapiens
LQVLDPVPK

SEQ ID NO: 11864 - protein, 12 aa, Homo sapiens
LDPQSGALYISK

SEQ ID NO: 11865 - protein, 14 aa, Homo sapiens
VRLDPQSGALYISK

SEQ ID NO: 11866 - protein, 11 aa, Homo sapiens
IEDMDDNCYLK

SEQ ID NO: 11867 - protein, 11 aa, Homo sapiens
QLTWFYTFDQK

SEQ ID NO: 11868 - protein, 8 aa, Homo sapiens
TGNEQEWK

SEQ ID NO: 11869 - protein, 13 aa, Homo sapiens
CYTCQVSNSVSSK

SEQ ID NO: 11870 - protein, 7 aa, Homo sapiens
IVEWDSR

SEQ ID NO: 11871 - protein, 8 aa, Homo sapiens
YVPLADVK

SEQ ID NO: 11872 - protein, 24 aa, Homo sapiens
RVEHNQSYSQAGITETEWTSGSSK

SEQ ID NO: 11873 - protein, 10 aa, Homo sapiens
KRVETSEHFR

SEQ ID NO: 11874 - protein, 8 aa, Homo sapiens
MEESFSSK

SEQ ID NO: 11875 - protein, 23 aa, Homo sapiens
VEHNQSYSQAGITETEWTSGSSK

SEQ ID NO: 11876 - protein, 18 aa, Homo sapiens
EMFPYEASTPTGISASCR

SEQ ID NO: 11877 - protein, 13 aa, Homo sapiens
GAAGRPLELSDFR

SEQ ID NO: 11878 - protein, 9 aa, Homo sapiens
GGPLQALTR

SEQ ID NO: 11879 - protein, 16 aa, Homo sapiens
HASPILPITEFSDIPR

SEQ ID NO: 11880 - protein, 28 aa, Homo sapiens
IDGPVISESTPIAETIMASSNESLVVNR

SEQ ID NO: 11881 - protein, 8 aa, Homo sapiens
PLELSDFR

SEQ ID NO: 11882 - protein, 10 aa, Homo sapiens
LKELQNEVEK

SEQ ID NO: 11883 - protein, 10 aa, Homo sapiens
GFAYIEFSDK

SEQ ID NO: 11884 - protein, 16 aa, Homo sapiens
AAAAAAAAAAGAAGGR

SEQ ID NO: 11885 - protein, 11 aa, Homo sapiens
TSLALDESLFR

SEQ ID NO: 11886 - protein, 16 aa, Homo sapiens
LPFVPPEEEFIMGVSK

SEQ ID NO: 11887 - protein, 15 aa, Homo sapiens
VLSTAFDSVLTSEKP

SEQ ID NO: 11888 - protein, 12 aa, Homo sapiens
VSTSDQYDVLHR

SEQ ID NO: 11889 - protein, 10 aa, Homo sapiens
VAQLCDFNPK

SEQ ID NO: 11890 - protein, 10 aa, Homo sapiens
RLQELDAASK

SEQ ID NO: 11891 - protein, 9 aa, Homo sapiens
LQELDAASK

SEQ ID NO: 11892 - protein, 10 aa, Homo sapiens
EETPGTEWEK

SEQ ID NO: 11893 - protein, 8 aa, Homo sapiens
ASEEAFVK

SEQ ID NO: 11894 - protein, 8 aa, Homo sapiens
DLEEWNQR

SEQ ID NO: 11895 - protein, 7 aa, Homo sapiens
VTEQEWR

SEQ ID NO: 11896 - protein, 17 aa, Homo sapiens
VSEGGPAEIAGLQIGDK

SEQ ID NO: 11897 - protein, 17 aa, Homo sapiens
SPQVKPASTMGMGPLGK

SEQ ID NO: 11898 - protein, 16 aa, Homo sapiens
SLGNILQAKPTSSPAK

SEQ ID NO: 11899 - protein, 18 aa, Homo sapiens
GSLGSQGAKDEPEEELQK

SEQ ID NO: 11900 - protein, 18 aa, Homo sapiens
LASTNSSVLGADLPSSMK

SEQ ID NO: 11901 - protein, 14 aa, Homo sapiens
GMGTVEGGDQSNPK

SEQ ID NO: 11902 - protein, 9 aa, Homo sapiens
TVANLLSGK

SEQ ID NO: 11903 - protein, 10 aa, Homo sapiens
GPASVPSVGK

SEQ ID NO: 11904 - protein, 9 aa, Homo sapiens
VGDVTPQVK

SEQ ID NO: 11905 - protein, 14 aa, Homo sapiens
KNPASLPLTQAALK

SEQ ID NO: 11906 - protein, 12 aa, Homo sapiens
VGPATPSAQVGK

SEQ ID NO: 11907 - protein, 9 aa, Homo sapiens
AGPVAVQVK

SEQ ID NO: 11908 - protein, 14 aa, Homo sapiens
LDSSPSVSSTLAAK

SEQ ID NO: 11909 - protein, 14 aa, Homo sapiens
GSLGQGTAPVLPGK

SEQ ID NO: 11910 - protein, 9 aa, Homo sapiens
TGPTVTQVK

SEQ ID NO: 11911 - protein, 12 aa, Homo sapiens
TSQVGAASAPAK

SEQ ID NO: 11912 - protein, 11 aa, Homo sapiens
KAEEDAALQAK

SEQ ID NO: 11913 - protein, 10 aa, Homo sapiens
ASEAQPPVAR

SEQ ID NO: 11914 - protein, 10 aa, Homo sapiens
NPQNSTVLAR

SEQ ID NO: 11915 - protein, 12 aa, Homo sapiens
SAHTLVGPTPSR

SEQ ID NO: 11916 - protein, 19 aa, Homo sapiens
SPAGPAATPAQAQAASTPR

SEQ ID NO: 11917 - protein, 12 aa, Homo sapiens
TNVVTMPTAHPR

SEQ ID NO: 11918 - protein, 10 aa, Homo sapiens
VLTELLEQER

SEQ ID NO: 11919 - protein, 11 aa, Homo sapiens
DGDTLNQHGIK

SEQ ID NO: 11920 - protein, 13 aa, Homo sapiens
AQQDQLVLIFAGK

SEQ ID NO: 11921 - protein, 16 aa, Homo sapiens
ALSNLESIPGGYNALR

SEQ ID NO: 11922 - protein, 20 aa, Homo sapiens
EANLQALIATGGDINAAIER

SEQ ID NO: 11923 - protein, 16 aa, Homo sapiens
FQQQLEQLNSMGFINR

SEQ ID NO: 11924 - protein, 15 aa, Homo sapiens
HMIMANPQMQQLMER

SEQ ID NO: 11925 - protein, 14 aa, Homo sapiens
MYTDIQEPMFSAAR

SEQ ID NO: 11926 - protein, 10 aa, Homo sapiens
NPAMMQEMMR

SEQ ID NO: 11927 - protein, 15 aa, Homo sapiens
NPEISHMLNNPELMR

SEQ ID NO: 11928 - protein, 18 aa, Homo sapiens
LALSQNQQSSGAAGPTGK

SEQ ID NO: 11929 - protein, 8 aa, Homo sapiens
VDDHLMGK

SEQ ID NO: 11930 - protein, 14 aa, Homo sapiens
STTSTIESFAAQEK

SEQ ID NO: 11931 - protein, 9 aa, Homo sapiens
LVEQLKEER

SEQ ID NO: 11932 - protein, 14 aa, Homo sapiens
MISAAQLLDELMGR

SEQ ID NO: 11933 - protein, 11 aa, Homo sapiens
YLQSLLAEVER

SEQ ID NO: 11934 - protein, 16 aa, Homo sapiens
YYLCGFCPAELFTNTR

SEQ ID NO: 11935 - protein, 20 aa, Homo sapiens
VNNSTMLGASGDYADFQYLK

SEQ ID NO: 11936 - protein, 15 aa, Homo sapiens
TQNPMVTGTSVLGVK

SEQ ID NO: 11937 - protein, 9 aa, Homo sapiens
FQIATVTEK

SEQ ID NO: 11938 - protein, 8 aa, Homo sapiens
AIHSWLTR

SEQ ID NO: 11939 - protein, 20 aa, Homo sapiens
FEGGVVIAADMLGSYGSLAR

SEQ ID NO: 11940 - protein, 17 aa, Homo sapiens
IPSTPDSFMDPASALYR

SEQ ID NO: 11941 - protein, 8 aa, Homo sapiens
MEAFLGSR

SEQ ID NO: 11942 - protein, 10 aa, Homo sapiens
QPVLSQTEAR

SEQ ID NO: 11943 - protein, 22 aa, Homo sapiens
QVLGQMVIDEELLGDGHSYSPR

SEQ ID NO: 11944 - protein, 11 aa, Homo sapiens
AIMAQLPQEQK

SEQ ID NO: 11945 - protein, 11 aa, Homo sapiens
TAVHAGNINFK

SEQ ID NO: 11946 - protein, 13 aa, Homo sapiens
NAGNEQDLGIQYK

SEQ ID NO: 11947 - protein, 9 aa, Homo sapiens
IVAECNAVR

SEQ ID NO: 11948 - protein, 17 aa, Homo sapiens
TSVQTEDDQLIAGQSAR

SEQ ID NO: 11949 - protein, 20 aa, Homo sapiens
DAFELFDTDKDEAIDYHELK

SEQ ID NO: 11950 - protein, 11 aa, Homo sapiens
ELSEEQKQEIK

SEQ ID NO: 11951 - protein, 12 aa, Homo sapiens
ELGENMSDEELR

SEQ ID NO: 11952 - protein, 23 aa, Homo sapiens
GFGFVTFENIDDAKDAMMAMNGK

SEQ ID NO: 11953 - protein, 21 aa, Homo sapiens
LFVGGLSFDTNEQSLEQVFSK

SEQ ID NO: 11954 - protein, 14 aa, Homo sapiens
GFGFVTFENIDDAK

SEQ ID NO: 11955 - protein, 13 aa, Homo sapiens
YGQISEVVVVKDR

SEQ ID NO: 11956 - protein, 11 aa, Homo sapiens
YGQISEVVVVK

SEQ ID NO: 11957 - protein, 20 aa, Homo sapiens
MTLDTLSIYETPSMGLLDKK

SEQ ID NO: 11958 - protein, 17 aa, Homo sapiens
YMTISDEWDIPEKQPFK

SEQ ID NO: 11959 - protein, 14 aa, Homo sapiens
ITNDFYPEEDGKTK

SEQ ID NO: 11960 - protein, 13 aa, Homo sapiens
PRPPTLLSQEQIK

SEQ ID NO: 11961 - protein, 8 aa, Homo sapiens
TMMEDFRK

SEQ ID NO: 11962 - protein, 8 aa, Homo sapiens
NGDYLCVK

SEQ ID NO: 11963 - protein, 10 aa, Homo sapiens
MAQELYMEQK

SEQ ID NO: 11964 - protein, 9 aa, Homo sapiens
ISVSFYHVK

SEQ ID NO: 11965 - protein, 10 aa, Homo sapiens
QVPVDVVEMK

SEQ ID NO: 11966 - protein, 18 aa, Homo sapiens
GYIFLEYASPAHAVDAVK

SEQ ID NO: 11967 - protein, 17 aa, Homo sapiens
TSIFWNDVKDPVSIEER

SEQ ID NO: 11968 - protein, 9 aa, Homo sapiens
VNLFTDFDK

SEQ ID NO: 11969 - protein, 14 aa, Homo sapiens
GFHCESSAHWPIFK

SEQ ID NO: 11970 - protein, 12 aa, Homo sapiens
ITNDFYPEEDGK

SEQ ID NO: 11971 - protein, 13 aa, Homo sapiens
YMTISDEWDIPEK

SEQ ID NO: 11972 - protein, 9 aa, Homo sapiens
NLFNVVDCK

SEQ ID NO: 11973 - protein, 9 aa, Homo sapiens
GIALWGGEK

SEQ ID NO: 11974 - protein, 19 aa, Homo sapiens
MTLDTLSIYETPSMGLLDK

SEQ ID NO: 11975 - protein, 12 aa, Homo sapiens
YVVTSVSWWSHK

SEQ ID NO: 11976 - protein, 14 aa, Homo sapiens
AQAVSEDAGGNEGR

SEQ ID NO: 11977 - protein, 19 aa, Homo sapiens
DFSWSPGGNIIAFWVPEDK

SEQ ID NO: 11978 - protein, 25 aa, Homo sapiens
DRPQEADGIDSVIVVDNVPQVGPDR

SEQ ID NO: 11979 - protein, 14 aa, Homo sapiens
ETIIAFAWEPNGSK

SEQ ID NO: 11980 - protein, 10 aa, Homo sapiens
FAVLHGEAPR

SEQ ID NO: 11981 - protein, 7 aa, Homo sapiens
FCQLLWR

SEQ ID NO: 11982 - protein, 16 aa, Homo sapiens
FSHQGVQLIDFSPCER

SEQ ID NO: 11983 - protein, 13 aa, Homo sapiens
GTQGVVTNFEIFR

SEQ ID NO: 11984 - protein, 10 aa, Homo sapiens
GTYLATFHQR

SEQ ID NO: 11985 - protein, 21 aa, Homo sapiens
QQANTIFWSPQGQFVVLAGLR

SEQ ID NO: 11986 - protein, 7 aa, Homo sapiens
TMMEDFR

SEQ ID NO: 11987 - protein, 13 aa, Homo sapiens
VDNAYWLWTFQGR

SEQ ID NO: 11988 - protein, 9 aa, Homo sapiens
VTLMQLPTR

SEQ ID NO: 11989 - protein, 7 aa, Homo sapiens
WTETYVR

SEQ ID NO: 11990 - protein, 9 aa, Homo sapiens
YWLEEAECR

SEQ ID NO: 11991 - protein, 17 aa, Homo sapiens
LLKEEKEELADQVLTLK

SEQ ID NO: 11992 - protein, 11 aa, Homo sapiens
LQELTDLLQEK

SEQ ID NO: 11993 - protein, 7 aa, Homo sapiens
KEYEMLR

SEQ ID NO: 11994 - protein, 14 aa, Homo sapiens
LRQDFEEVTTQNEK

SEQ ID NO: 11995 - protein, 14 aa, Homo sapiens
HLISSLQNHNHQLK

SEQ ID NO: 11996 - protein, 13 aa, Homo sapiens
EHLLQSNIGTGEK

SEQ ID NO: 11997 - protein, 16 aa, Homo sapiens
KLHDFQDEIVENSVTK

SEQ ID NO: 11998 - protein, 8 aa, Homo sapiens
HLAEVLER

SEQ ID NO: 11999 - protein, 15 aa, Homo sapiens
RYDLEQGLGDLLTER

SEQ ID NO: 12000 - protein, 14 aa, Homo sapiens
TEVIQLEDTLAQVR

SEQ ID NO: 12001 - protein, 11 aa, Homo sapiens
TQVDAQLQVVR

SEQ ID NO: 12002 - protein, 14 aa, Homo sapiens
YDLEQGLGDLLTER

SEQ ID NO: 12003 - protein, 10 aa, Homo sapiens
YWSQFDENIR

SEQ ID NO: 12004 - protein, 8 aa, Homo sapiens
KYQLAVTK

SEQ ID NO: 12005 - protein, 7 aa, Homo sapiens
YQLAVTK

SEQ ID NO: 12006 - protein, 12 aa, Homo sapiens
LATEGSSGATEK

SEQ ID NO: 12007 - protein, 19 aa, Homo sapiens
GLSDFLGVISDTFAPSPDK

SEQ ID NO: 12008 - protein, 10 aa, Homo sapiens
VHQLEQEQAR

SEQ ID NO: 12009 - protein, 11 aa, Homo sapiens
DPEFVFYDQLK

SEQ ID NO: 12010 - protein, 11 aa, Homo sapiens
LLDFSYEQYQK

SEQ ID NO: 12011 - protein, 13 aa, Homo sapiens
GSSLHLHVSKPPR

SEQ ID NO: 12012 - protein, 16 aa, Homo sapiens
THAAYNLLFFASGGGK

SEQ ID NO: 12013 - protein, 7 aa, Homo sapiens
FNYQGTK

SEQ ID NO: 12014 - protein, 11 aa, Homo sapiens
AMAAVPQDVVR

SEQ ID NO: 12015 - protein, 13 aa, Homo sapiens
AVSDWLIASVEGR

SEQ ID NO: 12016 - protein, 14 aa, Homo sapiens
DSTFLSTLEHHLSR

SEQ ID NO: 12017 - protein, 10 aa, Homo sapiens
EGTLQHAFLR

SEQ ID NO: 12018 - protein, 14 aa, Homo sapiens
ELETVAAHQFPEVR

SEQ ID NO: 12019 - protein, 8 aa, Homo sapiens
IIAEALTR

SEQ ID NO: 12020 - protein, 14 aa, Homo sapiens
INLAEDVLAWEHER

SEQ ID NO: 12021 - protein, 13 aa, Homo sapiens
LPAFTLSHLESHR

SEQ ID NO: 12022 - protein, 14 aa, Homo sapiens
MQQYDLQGQPYGTR

SEQ ID NO: 12023 - protein, 20 aa, Homo sapiens
QTQAASASQGSASAAEVLLR

SEQ ID NO: 12024 - protein, 14 aa, Homo sapiens
RLPAFTLSHLESHR

SEQ ID NO: 12025 - protein, 9 aa, Homo sapiens
TMAAEVLSR

SEQ ID NO: 12026 - protein, 14 aa, Homo sapiens
KHPDASVNFSEFSK

SEQ ID NO: 12027 - protein, 10 aa, Homo sapiens
EKGKFEDMAK

SEQ ID NO: 12028 - protein, 19 aa, Homo sapiens
KLGEMWNNTAADDKQPYEK

SEQ ID NO: 12029 - protein, 15 aa, Homo sapiens
KKHPDASVNFSEFSK

SEQ ID NO: 12030 - protein, 8 aa, Homo sapiens
GKPDAAKK

SEQ ID NO: 12031 - protein, 19 aa, Homo sapiens
LGEMWNNTAADDKQPYEKK

SEQ ID NO: 12032 - protein, 15 aa, Homo sapiens
IKGEHPGLSIGDVAK

SEQ ID NO: 12033 - protein, 10 aa, Homo sapiens
TYIPPKGETK

SEQ ID NO: 12034 - protein, 14 aa, Homo sapiens
KLGEMWNNTAADDK

SEQ ID NO: 12035 - protein, 8 aa, Homo sapiens
GKFEDMAK

SEQ ID NO: 12036 - protein, 18 aa, Homo sapiens
LGEMWNNTAADDKQPYEK

SEQ ID NO: 12037 - protein, 13 aa, Homo sapiens
HPDASVNFSEFSK

SEQ ID NO: 12038 - protein, 16 aa, Homo sapiens
RPPSAFFLFCSEYRPK

SEQ ID NO: 12039 - protein, 13 aa, Homo sapiens
LGEMWNNTAADDK

SEQ ID NO: 12040 - protein, 13 aa, Homo sapiens
GEHPGLSIGDVAK

SEQ ID NO: 12041 - protein, 8 aa, Homo sapiens
FKDPNAPK

SEQ ID NO: 12042 - protein, 14 aa, Homo sapiens
RPPSAFFLFCSEYR

SEQ ID NO: 12043 - protein, 15 aa, Homo sapiens
DFGNYLFNFASAATK

SEQ ID NO: 12044 - protein, 30 aa, Homo sapiens
KSEAAVPPWVDTNDEETIQQQILALSADKR

SEQ ID NO: 12045 - protein, 11 aa, Homo sapiens
KLEQCNTELKK

SEQ ID NO: 12046 - protein, 7 aa, Homo sapiens
ILMEFNK

SEQ ID NO: 12047 - protein, 18 aa, Homo sapiens
AELGTDLLSQLSLEDQKR

SEQ ID NO: 12048 - protein, 9 aa, Homo sapiens
SLDQAINDK

SEQ ID NO: 12049 - protein, 8 aa, Homo sapiens
DKMEDIER

SEQ ID NO: 12050 - protein, 10 aa, Homo sapiens
KYEAIQLTFK

SEQ ID NO: 12051 - protein, 14 aa, Homo sapiens
LFYHIVDSDEVSTK

SEQ ID NO: 12052 - protein, 21 aa, Homo sapiens
KGDVEGSQSQDEGEGSGESER

SEQ ID NO: 12053 - protein, 8 aa, Homo sapiens
SNPYYIVK

SEQ ID NO: 12054 - protein, 11 aa, Homo sapiens
EHMDAINHDTK

SEQ ID NO: 12055 - protein, 8 aa, Homo sapiens
NFSEVFQK

SEQ ID NO: 12056 - protein, 14 aa, Homo sapiens
MNLPGEVTFLPLNK

SEQ ID NO: 12057 - protein, 9 aa, Homo sapiens
KEESISLMK

SEQ ID NO: 12058 - protein, 11 aa, Homo sapiens
DQTIVDPFSSK

SEQ ID NO: 12059 - protein, 12 aa, Homo sapiens
ALDQFVNFSEQK

SEQ ID NO: 12060 - protein, 9 aa, Homo sapiens
AKLDELSAK

SEQ ID NO: 12061 - protein, 13 aa, Homo sapiens
VSHIDVITAEMAK

SEQ ID NO: 12062 - protein, 16 aa, Homo sapiens
DTAYPETNDAIPMISK

SEQ ID NO: 12063 - protein, 20 aa, Homo sapiens
ETEGGTVLTATTSELEAINK

SEQ ID NO: 12064 - protein, 16 aa, Homo sapiens
LHTLEEEKEELAQYQK

SEQ ID NO: 12065 - protein, 17 aa, Homo sapiens
AELGTDLLSQLSLEDQK

SEQ ID NO: 12066 - protein, 16 aa, Homo sapiens
SEDLDNSIDKTEAGIK

SEQ ID NO: 12067 - protein, 21 aa, Homo sapiens
ETEGGTVLTATTSELEAINKR

SEQ ID NO: 12068 - protein, 9 aa, Homo sapiens
LDQDLNEVK

SEQ ID NO: 12069 - protein, 12 aa, Homo sapiens
EENAEQQALAAK

SEQ ID NO: 12070 - protein, 12 aa, Homo sapiens
ELGSLPQEAFEK

SEQ ID NO: 12071 - protein, 11 aa, Homo sapiens
LPIDKEEVSLR

SEQ ID NO: 12072 - protein, 15 aa, Homo sapiens
AKDLQDELAGNSEQR

SEQ ID NO: 12073 - protein, 9 aa, Homo sapiens
IKLEGIITR

SEQ ID NO: 12074 - protein, 8 aa, Homo sapiens
KDQYFLDK

SEQ ID NO: 12075 - protein, 12 aa, Homo sapiens
KAEEELGELEAK

SEQ ID NO: 12076 - protein, 17 aa, Homo sapiens
AFTMDCITLEGDQVSHR

SEQ ID NO: 12077 - protein, 15 aa, Homo sapiens
ALEYTIYNQELNETR

SEQ ID NO: 12078 - protein, 21 aa, Homo sapiens
CDPAPFYLFDEIDQALDAQHR

SEQ ID NO: 12079 - protein, 10 aa, Homo sapiens
DFVEDDTTHG

SEQ ID NO: 12080 - protein, 13 aa, Homo sapiens
DLQDELAGNSEQR

SEQ ID NO: 12081 - protein, 11 aa, Homo sapiens
GALTGGYYDTR

SEQ ID NO: 12082 - protein, 20 aa, Homo sapiens
INNEIDQLMNQMQQIETQQR

SEQ ID NO: 12083 - protein, 12 aa, Homo sapiens
INQMATAPDSQR

SEQ ID NO: 12084 - protein, 11 aa, Homo sapiens
LALLHEGTGPR

SEQ ID NO: 12085 - protein, 14 aa, Homo sapiens
NDVMNLLESAGFSR

SEQ ID NO: 12086 - protein, 10 aa, Homo sapiens
QKELAETEPK

SEQ ID NO: 12087 - protein, 8 aa, Homo sapiens
QVIIQGFR

SEQ ID NO: 12088 - protein, 16 aa, Homo sapiens
RALEYTIYNQELNETR

SEQ ID NO: 12089 - protein, 10 aa, Homo sapiens
RVDALNDEIR

SEQ ID NO: 12090 - protein, 12 aa, Homo sapiens
SIMELMNVLELR

SEQ ID NO: 12091 - protein, 16 aa, Homo sapiens
SLQSLEASLHAMESTR

SEQ ID NO: 12092 - protein, 10 aa, Homo sapiens
SMEVSTQLAR

SEQ ID NO: 12093 - protein, 9 aa, Homo sapiens
VDALNDEIR

SEQ ID NO: 12094 - protein, 10 aa, Homo sapiens
VETYLNENLR

SEQ ID NO: 12095 - protein, 20 aa, Homo sapiens
NYGSYSTQASAAAATAELLK

SEQ ID NO: 12096 - protein, 16 aa, Homo sapiens
AQQEFAAGVFSNPAVR

SEQ ID NO: 12097 - protein, 28 aa, Homo sapiens
DGGNPFAEPSELDNPFQDPAVIQHRPSR

SEQ ID NO: 12098 - protein, 13 aa, Homo sapiens
ELQHAALGGTATR

SEQ ID NO: 12099 - protein, 26 aa, Homo sapiens
EPPPAYEPPAPAPLPPPSAPSLQPSR

SEQ ID NO: 12100 - protein, 15 aa, Homo sapiens
ERELQHAALGGTATR

SEQ ID NO: 12101 - protein, 14 aa, Homo sapiens
QYATLDVYNPFETR

SEQ ID NO: 12102 - protein, 16 aa, Homo sapiens
TAAANAAAGAAENAFR

SEQ ID NO: 12103 - protein, 8 aa, Homo sapiens
FGPLASVK

SEQ ID NO: 12104 - protein, 20 aa, Homo sapiens
NPPNQSSNERPPSLLVIETK

SEQ ID NO: 12105 - protein, 14 aa, Homo sapiens
KPGQSFQEQVEHYR

SEQ ID NO: 12106 - protein, 14 aa, Homo sapiens
LYLVSDVLYNSSAK

SEQ ID NO: 12107 - protein, 8 aa, Homo sapiens
DKLEEILR

SEQ ID NO: 12108 - protein, 18 aa, Homo sapiens
SLDDDLDGVPLDATEDSK

SEQ ID NO: 12109 - protein, 11 aa, Homo sapiens
SNLELFKEELK

SEQ ID NO: 12110 - protein, 9 aa, Homo sapiens
FQDELESGK

SEQ ID NO: 12111 - protein, 12 aa, Homo sapiens
LYSILQGDSPTK

SEQ ID NO: 12112 - protein, 12 aa, Homo sapiens
TIQGHLQSENFK

SEQ ID NO: 12113 - protein, 12 aa, Homo sapiens
EGPMFEAMIMNR

SEQ ID NO: 12114 - protein, 8 aa, Homo sapiens
EINNPMFR

SEQ ID NO: 12115 - protein, 13 aa, Homo sapiens
ESLCDSPHQNLSR

SEQ ID NO: 12116 - protein, 12 aa, Homo sapiens
FEPPQSDSDGQR

SEQ ID NO: 12117 - protein, 14 aa, Homo sapiens
FLFENQTPAHVYYR

SEQ ID NO: 12118 - protein, 13 aa, Homo sapiens
LCQIFSDLNATYR

SEQ ID NO: 12119 - protein, 8 aa, Homo sapiens
NLLALIHR

SEQ ID NO: 12120 - protein, 8 aa, Homo sapiens
VANASYYR

SEQ ID NO: 12121 - protein, 9 aa, Homo sapiens
YSEMSEEKR

SEQ ID NO: 12122 - protein, 19 aa, Homo sapiens
HSVESMITTLDPGMAPYIK

SEQ ID NO: 12123 - protein, 15 aa, Homo sapiens
GQDEASAGGIWGFIK

SEQ ID NO: 12124 - protein, 8 aa, Homo sapiens
QMIYSAAR

SEQ ID NO: 12125 - protein, 12 aa, Homo sapiens
TDWHMAFTGMSR

SEQ ID NO: 12126 - protein, 15 aa, Homo sapiens
GYAEVVVASENSVHK

SEQ ID NO: 12127 - protein, 25 aa, Homo sapiens
AVSGASAGDYSDAIETLLTAIAVIK

SEQ ID NO: 12128 - protein, 11 aa, Homo sapiens
SIGVYDVVELK

SEQ ID NO: 12129 - protein, 19 aa, Homo sapiens
DSGPPPSTVSEAEFEDIMK

SEQ ID NO: 12130 - protein, 13 aa, Homo sapiens
ATPSENLVPSSAR

SEQ ID NO: 12131 - protein, 16 aa, Homo sapiens
DLLHNEDRHDDYFQER

SEQ ID NO: 12132 - protein, 11 aa, Homo sapiens
QNLSQFEAQAR

SEQ ID NO: 12133 - protein, 11 aa, Homo sapiens
SSSTEPPPPVR

SEQ ID NO: 12134 - protein, 12 aa, Homo sapiens
SYSVGASGSSSR

SEQ ID NO: 12135 - protein, 12 aa, Homo sapiens
TPAILYTYSGLR

SEQ ID NO: 12136 - protein, 7 aa, Homo sapiens
PELAVQK

SEQ ID NO: 12137 - protein, 9 aa, Homo sapiens
EGQEKEESK

SEQ ID NO: 12138 - protein, 10 aa, Homo sapiens
NDIAINELMK

SEQ ID NO: 12139 - protein, 11 aa, Homo sapiens
VVGVLLGSWQK

SEQ ID NO: 12140 - protein, 13 aa, Homo sapiens
DIKDTTVGTLSQR

SEQ ID NO: 12141 - protein, 9 aa, Homo sapiens
ITNQVHGLK

SEQ ID NO: 12142 - protein, 10 aa, Homo sapiens
IVGWYHTGPK

SEQ ID NO: 12143 - protein, 12 aa, Homo sapiens
SVVALHNLINNK

SEQ ID NO: 12144 - protein, 10 aa, Homo sapiens
DTTVGTLSQR

SEQ ID NO: 12145 - protein, 24 aa, Homo sapiens
TFEHVTSEIGAEEAEEVGVEHLLR

SEQ ID NO: 12146 - protein, 15 aa, Homo sapiens
TNDQMVVVYLASLIR

SEQ ID NO: 12147 - protein, 17 aa, Homo sapiens
VVVHPLVLLSVVDHFNR

SEQ ID NO: 12148 - protein, 19 aa, Homo sapiens
ILGDPEEESWSPSLTNLEK

SEQ ID NO: 12149 - protein, 14 aa, Homo sapiens
HPDSSVNFAEFSKK

SEQ ID NO: 12150 - protein, 14 aa, Homo sapiens
KHPDSSVNFAEFSK

SEQ ID NO: 12151 - protein, 15 aa, Homo sapiens
KHPDSSVNFAEFSKK

SEQ ID NO: 12152 - protein, 10 aa, Homo sapiens
NYVPPKGDKK

SEQ ID NO: 12153 - protein, 7 aa, Homo sapiens
KDPNAPK

SEQ ID NO: 12154 - protein, 15 aa, Homo sapiens
KKHPDSSVNFAEFSK

SEQ ID NO: 12155 - protein, 8 aa, Homo sapiens
KKDPNAPK

SEQ ID NO: 12156 - protein, 7 aa, Homo sapiens
GDPNKPR

SEQ ID NO: 12157 - protein, 8 aa, Homo sapiens
GKSEAGKK

SEQ ID NO: 12158 - protein, 10 aa, Homo sapiens
KGPGRPTGSK

SEQ ID NO: 12159 - protein, 16 aa, Homo sapiens
MSSYAFFVQTCREEHK

SEQ ID NO: 12160 - protein, 9 aa, Homo sapiens
GKGDPNKPR

SEQ ID NO: 12161 - protein, 12 aa, Homo sapiens
KLGEMWSEQSAK

SEQ ID NO: 12162 - protein, 9 aa, Homo sapiens
NYVPPKGDK

SEQ ID NO: 12163 - protein, 8 aa, Homo sapiens
SKFEDMAK

SEQ ID NO: 12164 - protein, 8 aa, Homo sapiens
DKQPYEQK

SEQ ID NO: 12165 - protein, 9 aa, Homo sapiens
YEKDIAAYR

SEQ ID NO: 12166 - protein, 15 aa, Homo sapiens
IKSEHPGLSIGDTAK

SEQ ID NO: 12167 - protein, 16 aa, Homo sapiens
RPPSAFFLFCSEHRPK

SEQ ID NO: 12168 - protein, 13 aa, Homo sapiens
HPDSSVNFAEFSK

SEQ ID NO: 12169 - protein, 13 aa, Homo sapiens
SEHPGLSIGDTAK

SEQ ID NO: 12170 - protein, 11 aa, Homo sapiens
LGEMWSEQSAK

SEQ ID NO: 12171 - protein, 12 aa, Homo sapiens
MSSYAFFVQTCR

SEQ ID NO: 12172 - protein, 14 aa, Homo sapiens
RPPSAFFLFCSEHR

SEQ ID NO: 12173 - protein, 8 aa, Homo sapiens
KMTTLQLK

SEQ ID NO: 12174 - protein, 11 aa, Homo sapiens
LQLLEEENKER

SEQ ID NO: 12175 - protein, 32 aa, Homo sapiens
IVVAGNNEDVSFSRPADLDLIQSTPFKPLALK

SEQ ID NO: 12176 - protein, 18 aa, Homo sapiens
PADLDLIQSTPFKPLALK

SEQ ID NO: 12177 - protein, 12 aa, Homo sapiens
RLQLLEEENKER

SEQ ID NO: 12178 - protein, 14 aa, Homo sapiens
IVVAGNNEDVSFSR

SEQ ID NO: 12179 - protein, 27 aa, Homo sapiens
VLTLSERPLDFLDLERPPTTPQNEEIR

SEQ ID NO: 12180 - protein, 20 aa, Homo sapiens
MAEEVSTLMKATVLMRQPGR

SEQ ID NO: 12181 - protein, 9 aa, Homo sapiens
VQEIVGALR

SEQ ID NO: 12182 - protein, 15 aa, Homo sapiens
KAEAGAGSATEFQFR

SEQ ID NO: 12183 - protein, 14 aa, Homo sapiens
AEAGAGSATEFQFR

SEQ ID NO: 12184 - protein, 11 aa, Homo sapiens
MSIMMLPMEQK

SEQ ID NO: 12185 - protein, 15 aa, Homo sapiens
MKDTDSEEEIREAFR

SEQ ID NO: 12186 - protein, 11 aa, Homo sapiens
MKDTDSEEEIR

SEQ ID NO: 12187 - protein, 17 aa, Homo sapiens
EAFSLFDKDGDGTITTK

SEQ ID NO: 12188 - protein, 22 aa, Homo sapiens
EADIDGDGQVNYEEFVQMMTAK

SEQ ID NO: 12189 - protein, 12 aa, Homo sapiens
KMKDTDSEEEIR

SEQ ID NO: 12190 - protein, 16 aa, Homo sapiens
VFDKDGNGYISAAELR

SEQ ID NO: 12191 - protein, 13 aa, Homo sapiens
ADQLTEEQIAEFK

SEQ ID NO: 12192 - protein, 12 aa, Homo sapiens
DGNGYISAAELR

SEQ ID NO: 12193 - protein, 9 aa, Homo sapiens
DTDSEEEIR

SEQ ID NO: 12194 - protein, 15 aa, Homo sapiens
ALADIVIPQEYGITK

SEQ ID NO: 12195 - protein, 16 aa, Homo sapiens
FFVGPEDTEINPGNYR

SEQ ID NO: 12196 - protein, 9 aa, Homo sapiens
LENTMELYR

SEQ ID NO: 12197 - protein, 10 aa, Homo sapiens
QTVCGFDLLR

SEQ ID NO: 12198 - protein, 18 aa, Homo sapiens
QVDEFLASIASPSSDVPR

SEQ ID NO: 12199 - protein, 11 aa, Homo sapiens
SSVYSPESNVR

SEQ ID NO: 12200 - protein, 13 aa, Homo sapiens
VYSLIQSLTSQIR

SEQ ID NO: 12201 - protein, 14 aa, Homo sapiens
VYTVGPDYAHAEAR

SEQ ID NO: 12202 - protein, 24 aa, Homo sapiens
GEVTEMFSYEESNPKDPAAVTESK

SEQ ID NO: 12203 - protein, 7 aa, Homo sapiens
SFEAPIK

SEQ ID NO: 12204 - protein, 10 aa, Homo sapiens
LVFPQDLLEK

SEQ ID NO: 12205 - protein, 11 aa, Homo sapiens
EEIINYEFDTK

SEQ ID NO: 12206 - protein, 25 aa, Homo sapiens
QYQLLFTQGSGENKEEIINYEFDTK

SEQ ID NO: 12207 - protein, 15 aa, Homo sapiens
GEVTEMFSYEESNPK

SEQ ID NO: 12208 - protein, 9 aa, Homo sapiens
DPAAVTESK

SEQ ID NO: 12209 - protein, 14 aa, Homo sapiens
QYQLLFTQGSGENK

SEQ ID NO: 12210 - protein, 9 aa, Homo sapiens
FFPASFPNR

SEQ ID NO: 12211 - protein, 12 aa, Homo sapiens
NASDMPETITSR

SEQ ID NO: 12212 - protein, 17 aa, Homo sapiens
AGEAAELQDAEVESSAK

SEQ ID NO: 12213 - protein, 33 aa, Homo sapiens
KVDEGAGDSAAVASGGAQTLALAGSPAPSGHPK

SEQ ID NO: 12214 - protein, 17 aa, Homo sapiens
EQPPTEPGPQSASEVEK

SEQ ID NO: 12215 - protein, 14 aa, Homo sapiens
FKPSSLPHPLEGSR

SEQ ID NO: 12216 - protein, 20 aa, Homo sapiens
KVEEEGSPGDPDHEASTQGR

SEQ ID NO: 12217 - protein, 9 aa, Homo sapiens
FFLEETLVR

SEQ ID NO: 12218 - protein, 20 aa, Homo sapiens
PAGPAGDEPAESPSETPGPR

SEQ ID NO: 12219 - protein, 12 aa, Homo sapiens
QSALDYFMFAVR

SEQ ID NO: 12220 - protein, 16 aa, Homo sapiens
SLGELGLEHFQAPLVR

SEQ ID NO: 12221 - protein, 12 aa, Homo sapiens
SVEPQDAGPLER

SEQ ID NO: 12222 - protein, 19 aa, Homo sapiens
TGTQEVGGQDPGEAVQPCR

SEQ ID NO: 12223 - protein, 8 aa, Homo sapiens
VDEGPQPR

SEQ ID NO: 12224 - protein, 10 aa, Homo sapiens
LLSNDEVTIK

SEQ ID NO: 12225 - protein, 29 aa, Homo sapiens
LLDSLEPPGEPGPSTNIPENDTVDGREEK

SEQ ID NO: 12226 - protein, 8 aa, Homo sapiens
AQLGEDIR

SEQ ID NO: 12227 - protein, 19 aa, Homo sapiens
IPIHNEDITYDELVLMMQR

SEQ ID NO: 12228 - protein, 17 aa, Homo sapiens
NRPPFGQGYTQPGPGYR

SEQ ID NO: 12229 - protein, 24 aa, Homo sapiens
NVMSAFGLTDDQVSGPPSAPAEDR

SEQ ID NO: 12230 - protein, 16 aa, Homo sapiens
SPEEAGFPGDPHEDKQ

SEQ ID NO: 12231 - protein, 13 aa, Homo sapiens
EAMEHPYFYTVVK

SEQ ID NO: 12232 - protein, 13 aa, Homo sapiens
VLGTEDLYDYIDK

SEQ ID NO: 12233 - protein, 18 aa, Homo sapiens
GGPNIITLADIVKDPVSR

SEQ ID NO: 12234 - protein, 20 aa, Homo sapiens
FVHSENQHLVSPEALDFLDK

SEQ ID NO: 12235 - protein, 16 aa, Homo sapiens
KEPFFHGHDNYDQLVR

SEQ ID NO: 12236 - protein, 21 aa, Homo sapiens
VLGTEDLYDYIDKYNIELDPR

SEQ ID NO: 12237 - protein, 13 aa, Homo sapiens
GGPNIITLADIVK

SEQ ID NO: 12238 - protein, 15 aa, Homo sapiens
TPALVFEHVNNTDFK

SEQ ID NO: 12239 - protein, 15 aa, Homo sapiens
YSEVFEAINITNNEK

SEQ ID NO: 12240 - protein, 13 aa, Homo sapiens
ALDYCHSMGIMHR

SEQ ID NO: 12241 - protein, 15 aa, Homo sapiens
EPFFHGHDNYDQLVR

SEQ ID NO: 12242 - protein, 19 aa, Homo sapiens
LIDWGLAEFYHPGQEYNVR

SEQ ID NO: 12243 - protein, 12 aa, Homo sapiens
QLYQTLTDYDIR

SEQ ID NO: 12244 - protein, 11 aa, Homo sapiens
VYTDVNTHRPR

SEQ ID NO: 12245 - protein, 10 aa, Homo sapiens
LPKPPKPVSK

SEQ ID NO: 12246 - protein, 29 aa, Homo sapiens
HSLEQKPTDAPPKESLELEDPSSGLGVTK

SEQ ID NO: 12247 - protein, 17 aa, Homo sapiens
LDKLTVTSQNLQLENLR

SEQ ID NO: 12248 - protein, 13 aa, Homo sapiens
HSLEQKPTDAPPK

SEQ ID NO: 12249 - protein, 16 aa, Homo sapiens
ESLELEDPSSGLGVTK

SEQ ID NO: 12250 - protein, 11 aa, Homo sapiens
EDQKPVMDDQR

SEQ ID NO: 12251 - protein, 9 aa, Homo sapiens
NTMETIDWK

SEQ ID NO: 12252 - protein, 14 aa, Homo sapiens
DLISNNEQLPMLGR

SEQ ID NO: 12253 - protein, 8 aa, Homo sapiens
GSFPENLR

SEQ ID NO: 12254 - protein, 14 aa, Homo sapiens
LTVTSQNLQLENLR

SEQ ID NO: 12255 - protein, 11 aa, Homo sapiens
ELALNTAQFAK

SEQ ID NO: 12256 - protein, 10 aa, Homo sapiens
WQDAQATLQK

SEQ ID NO: 12257 - protein, 14 aa, Homo sapiens
VGKEDSSSAEFLEK

SEQ ID NO: 12258 - protein, 11 aa, Homo sapiens
MNESDIWFEEK

SEQ ID NO: 12259 - protein, 11 aa, Homo sapiens
RFSDFLGLYEK

SEQ ID NO: 12260 - protein, 10 aa, Homo sapiens
FSDFLGLYEK

SEQ ID NO: 12261 - protein, 10 aa, Homo sapiens
EFLEKEELPR

SEQ ID NO: 12262 - protein, 14 aa, Homo sapiens
AVGTQTLSGAGLLK

SEQ ID NO: 12263 - protein, 12 aa, Homo sapiens
ASGGGGCSASER

SEQ ID NO: 12264 - protein, 9 aa, Homo sapiens
DEILEWESR

SEQ ID NO: 12265 - protein, 14 aa, Homo sapiens
IVNHPTMLQDPDVR

SEQ ID NO: 12266 - protein, 16 aa, Homo sapiens
SLAMLGSSEDNTALSR

SEQ ID NO: 12267 - protein, 11 aa, Homo sapiens
VTTQTSLPLFR

SEQ ID NO: 12268 - protein, 13 aa, Homo sapiens
KPPTDEELKETIK

SEQ ID NO: 12269 - protein, 13 aa, Homo sapiens
LLASANLEEVTMK

SEQ ID NO: 12270 - protein, 13 aa, Homo sapiens
LLYNRPGTVSSLK

SEQ ID NO: 12271 - protein, 7 aa, Homo sapiens
IHFFLSK

SEQ ID NO: 12272 - protein, 9 aa, Homo sapiens
SGVNSELVK

SEQ ID NO: 12273 - protein, 14 aa, Homo sapiens
KVYENYPTYDLTER

SEQ ID NO: 12274 - protein, 9 aa, Homo sapiens
ILNFLMHPK

SEQ ID NO: 12275 - protein, 12 aa, Homo sapiens
NVGQFSGFPFEK

SEQ ID NO: 12276 - protein, 9 aa, Homo sapiens
EPFTIAQGK

SEQ ID NO: 12277 - protein, 10 aa, Homo sapiens
LTMQVSSLQR

SEQ ID NO: 12278 - protein, 10 aa, Homo sapiens
SICEVLDLER

SEQ ID NO: 12279 - protein, 13 aa, Homo sapiens
VYENYPTYDLTER

SEQ ID NO: 12280 - protein, 11 aa, Homo sapiens
TEQSVTPEQQK

SEQ ID NO: 12281 - protein, 12 aa, Homo sapiens
LCNDLMNCVQER

SEQ ID NO: 12282 - protein, 32 aa, Homo sapiens
EEAVPEASPVTQAGASVITVETVIQENVGAQK

SEQ ID NO: 12283 - protein, 12 aa, Homo sapiens
LSMYGVDLHHAK

SEQ ID NO: 12284 - protein, 9 aa, Homo sapiens
LVSPEQPPK

SEQ ID NO: 12285 - protein, 16 aa, Homo sapiens
VRPAELEQFESTIGFK

SEQ ID NO: 12286 - protein, 11 aa, Homo sapiens
NLPWLFTFNVK

SEQ ID NO: 12287 - protein, 15 aa, Homo sapiens
VTLLDGTEYSCDLEK

SEQ ID NO: 12288 - protein, 16 aa, Homo sapiens
GLSPAQADSQFLENAK

SEQ ID NO: 12289 - protein, 12 aa, Homo sapiens
TTEVGSVSEVKK

SEQ ID NO: 12290 - protein, 10 aa, Homo sapiens
APHLQLIEGK

SEQ ID NO: 12291 - protein, 11 aa, Homo sapiens
VEMQPTELVSK

SEQ ID NO: 12292 - protein, 25 aa, Homo sapiens
VTEGTIREEQEYEEEVEEEPRPAAK

SEQ ID NO: 12293 - protein, 14 aa, Homo sapiens
DYFGLLFQESPEQK

SEQ ID NO: 12294 - protein, 12 aa, Homo sapiens
SSHETLNIVEEK

SEQ ID NO: 12295 - protein, 12 aa, Homo sapiens
EISPGSGPGEIR

SEQ ID NO: 12296 - protein, 10 aa, Homo sapiens
EQHPDMSVTR

SEQ ID NO: 12297 - protein, 15 aa, Homo sapiens
FYPPDPSQLTEDITR

SEQ ID NO: 12298 - protein, 12 aa, Homo sapiens
TEMVTISDASQR

SEQ ID NO: 12299 - protein, 10 aa, Homo sapiens
VCVEHHTFYR

SEQ ID NO: 12300 - protein, 8 aa, Homo sapiens
ISEQSDAK

SEQ ID NO: 12301 - protein, 15 aa, Homo sapiens
NVQAEEMVEFSSGLK

SEQ ID NO: 12302 - protein, 9 aa, Homo sapiens
RLTDADAMK

SEQ ID NO: 12303 - protein, 14 aa, Homo sapiens
LKEIVTNFLAGFEA

SEQ ID NO: 12304 - protein, 10 aa, Homo sapiens
GYLDKLEPSK

SEQ ID NO: 12305 - protein, 20 aa, Homo sapiens
GMSLNLEPDNVGVVVFGNDK

SEQ ID NO: 12306 - protein, 8 aa, Homo sapiens
LTDADAMK

SEQ ID NO: 12307 - protein, 8 aa, Homo sapiens
STVAQLVK

SEQ ID NO: 12308 - protein, 18 aa, Homo sapiens
VVDALGNAIDGKGPIGSK

SEQ ID NO: 12309 - protein, 9 aa, Homo sapiens
RSTVAQLVK

SEQ ID NO: 12310 - protein, 12 aa, Homo sapiens
VVDALGNAIDGK

SEQ ID NO: 12311 - protein, 12 aa, Homo sapiens
TSIAIDTIINQK

SEQ ID NO: 12312 - protein, 8 aa, Homo sapiens
EPMQTGIK

SEQ ID NO: 12313 - protein, 11 aa, Homo sapiens
HALIIYDDLSK

SEQ ID NO: 12314 - protein, 7 aa, Homo sapiens
APGIIPR

SEQ ID NO: 12315 - protein, 10 aa, Homo sapiens
AVDSLVPIGR

SEQ ID NO: 12316 - protein, 13 aa, Homo sapiens
EAYPGDVFYLHSR

SEQ ID NO: 12317 - protein, 12 aa, Homo sapiens
EIVTNFLAGFEA

SEQ ID NO: 12318 - protein, 22 aa, Homo sapiens
EVAAFAQFGSDLDAATQQLLSR

SEQ ID NO: 12319 - protein, 21 aa, Homo sapiens
FENAFLSHVVSQHQALLGTIR

SEQ ID NO: 12320 - protein, 14 aa, Homo sapiens
GIRPAINVGLSVSR

SEQ ID NO: 12321 - protein, 15 aa, Homo sapiens
ILGADTSVDLEETGR

SEQ ID NO: 12322 - protein, 7 aa, Homo sapiens
LELAQYR

SEQ ID NO: 12323 - protein, 11 aa, Homo sapiens
PAINVGLSVSR

SEQ ID NO: 12324 - protein, 21 aa, Homo sapiens
QGQYSPMAIEEQVAVIYAGVR

SEQ ID NO: 12325 - protein, 7 aa, Homo sapiens
QMSLLLR

SEQ ID NO: 12326 - protein, 17 aa, Homo sapiens
RTGAIVDVPVGEELLGR

SEQ ID NO: 12327 - protein, 16 aa, Homo sapiens
TGAIVDVPVGEELLGR

SEQ ID NO: 12328 - protein, 13 aa, Homo sapiens
TGTAEMSSILEER

SEQ ID NO: 12329 - protein, 10 aa, Homo sapiens
VLSIGDGIAR

SEQ ID NO: 12330 - protein, 15 aa, Homo sapiens
LQLDSPEDAEFIVAK

SEQ ID NO: 12331 - protein, 8 aa, Homo sapiens
ISDDLMQK

SEQ ID NO: 12332 - protein, 9 aa, Homo sapiens
RLNHYVLYK

SEQ ID NO: 12333 - protein, 11 aa, Homo sapiens
FNQVLDQFGEK

SEQ ID NO: 12334 - protein, 11 aa, Homo sapiens
EREQQDLEFAK

SEQ ID NO: 12335 - protein, 13 aa, Homo sapiens
NYLHYSLYDQAEK

SEQ ID NO: 12336 - protein, 15 aa, Homo sapiens
ELDTVTLEDIKEHVK

SEQ ID NO: 12337 - protein, 9 aa, Homo sapiens
EQQDLEFAK

SEQ ID NO: 12338 - protein, 16 aa, Homo sapiens
EEAATGGGSTGEADGK

SEQ ID NO: 12339 - protein, 12 aa, Homo sapiens
VYEFLDKLDVVR

SEQ ID NO: 12340 - protein, 10 aa, Homo sapiens
AIQLEYSEAR

SEQ ID NO: 12341 - protein, 7 aa, Homo sapiens
CYYYHAR

SEQ ID NO: 12342 - protein, 8 aa, Homo sapiens
DLESAEER

SEQ ID NO: 12343 - protein, 9 aa, Homo sapiens
EMIDIYSTR

SEQ ID NO: 12344 - protein, 15 aa, Homo sapiens
HDADGQATLLNLLLR

SEQ ID NO: 12345 - protein, 8 aa, Homo sapiens
MISLSYSR

SEQ ID NO: 12346 - protein, 14 aa, Homo sapiens
SVFPEQANNNEWAR

SEQ ID NO: 12347 - protein, 7 aa, Homo sapiens
YLYYTGR

SEQ ID NO: 12348 - protein, 19 aa, Homo sapiens
AQQNNVEHKVETFSGVYKK

SEQ ID NO: 12349 - protein, 23 aa, Homo sapiens
TLTAVHDAILEDLVFPSEIVGKR

SEQ ID NO: 12350 - protein, 15 aa, Homo sapiens
LTGKDVNFEFPEFQL

SEQ ID NO: 12351 - protein, 30 aa, Homo sapiens
IVKPNGEKPDEFESGISQALLELEMNSDLK

SEQ ID NO: 12352 - protein, 18 aa, Homo sapiens
AQQNNVEHKVETFSGVYK

SEQ ID NO: 12353 - protein, 9 aa, Homo sapiens
EIEVGGGRK

SEQ ID NO: 12354 - protein, 9 aa, Homo sapiens
VETFSGVYK

SEQ ID NO: 12355 - protein, 10 aa, Homo sapiens
VETFSGVYKK

SEQ ID NO: 12356 - protein, 8 aa, Homo sapiens
RILPKPTR

SEQ ID NO: 12357 - protein, 13 aa, Homo sapiens
KAIIIFVPVPQLK

SEQ ID NO: 12358 - protein, 12 aa, Homo sapiens
AIIIFVPVPQLK

SEQ ID NO: 12359 - protein, 8 aa, Homo sapiens
ELNITAAK

SEQ ID NO: 12360 - protein, 9 aa, Homo sapiens
AQQNNVEHK

SEQ ID NO: 12361 - protein, 11 aa, Homo sapiens
DVNFEFPEFQL

SEQ ID NO: 12362 - protein, 8 aa, Homo sapiens
HVVFIAQR

SEQ ID NO: 12363 - protein, 13 aa, Homo sapiens
PNHTIYINNLNEK

SEQ ID NO: 12364 - protein, 8 aa, Homo sapiens
GQAFVIFK

SEQ ID NO: 12365 - protein, 19 aa, Homo sapiens
AVPETRPNHTIYINNLNEK

SEQ ID NO: 12366 - protein, 8 aa, Homo sapiens
TDSDIIAK

SEQ ID NO: 12367 - protein, 7 aa, Homo sapiens
DALQGFK

SEQ ID NO: 12368 - protein, 30 aa, Homo sapiens
KAVQGGGATPVVGAVQGPVPGMPPMTQAPR

SEQ ID NO: 12369 - protein, 10 aa, Homo sapiens
EVSSATNALR

SEQ ID NO: 12370 - protein, 18 aa, Homo sapiens
HDIAFVEFDNEVQAGAAR

SEQ ID NO: 12371 - protein, 13 aa, Homo sapiens
SQTDQLVLIFAGK

SEQ ID NO: 12372 - protein, 15 aa, Homo sapiens
NPEISHLLNNPDIMR

SEQ ID NO: 12373 - protein, 20 aa, Homo sapiens
NQDLALSNLESIPGGYNALR

SEQ ID NO: 12374 - protein, 11 aa, Homo sapiens
VEVSEDEPASK

SEQ ID NO: 12375 - protein, 13 aa, Homo sapiens
KICSHSAPEQQAR

SEQ ID NO: 12376 - protein, 16 aa, Homo sapiens
ICFNTPLAPQALEDVK

SEQ ID NO: 12377 - protein, 12 aa, Homo sapiens
EQADFALEALAK

SEQ ID NO: 12378 - protein, 11 aa, Homo sapiens
ELFQETLESLR

SEQ ID NO: 12379 - protein, 12 aa, Homo sapiens
GDGLVDVMWEYK

SEQ ID NO: 12380 - protein, 11 aa, Homo sapiens
DSWLDNIDWVK

SEQ ID NO: 12381 - protein, 10 aa, Homo sapiens
GNLGVYQETR

SEQ ID NO: 12382 - protein, 25 aa, Homo sapiens
ITPFNLQEEMEEGHFDADGNYFLNR

SEQ ID NO: 12383 - protein, 11 aa, Homo sapiens
LSGLADQMVAR

SEQ ID NO: 12384 - protein, 14 aa, Homo sapiens
LVDPVAGSGGPGSR

SEQ ID NO: 12385 - protein, 16 aa, Homo sapiens
ALKDEEKMELQEIQLK

SEQ ID NO: 12386 - protein, 13 aa, Homo sapiens
YSQKEDKYEEEIK

SEQ ID NO: 12387 - protein, 7 aa, Homo sapiens
LMDQNLK

SEQ ID NO: 12388 - protein, 18 aa, Homo sapiens
KIQVLQQQADDAEERAER

SEQ ID NO: 12389 - protein, 11 aa, Homo sapiens
CTKEEHLCTQR

SEQ ID NO: 12390 - protein, 11 aa, Homo sapiens
AGITTIEAVKR

SEQ ID NO: 12391 - protein, 9 aa, Homo sapiens
MELQEIQLK

SEQ ID NO: 12392 - protein, 10 aa, Homo sapiens
TIDDLEDKLK

SEQ ID NO: 12393 - protein, 9 aa, Homo sapiens
EDKYEEEIK

SEQ ID NO: 12394 - protein, 7 aa, Homo sapiens
KYEEVAR

SEQ ID NO: 12395 - protein, 7 aa, Homo sapiens
LATALQK

SEQ ID NO: 12396 - protein, 15 aa, Homo sapiens
KIQVLQQQADDAEER

SEQ ID NO: 12397 - protein, 11 aa, Homo sapiens
KLVIIEGDLER

SEQ ID NO: 12398 - protein, 10 aa, Homo sapiens
AGITTIEAVK

SEQ ID NO: 12399 - protein, 8 aa, Homo sapiens
TIDDLEDK

SEQ ID NO: 12400 - protein, 14 aa, Homo sapiens
AREQAEAEVASLNR

SEQ ID NO: 12401 - protein, 15 aa, Homo sapiens
AREQAEAEVASLNRR

SEQ ID NO: 12402 - protein, 9 aa, Homo sapiens
CREMDEQIR

SEQ ID NO: 12403 - protein, 7 aa, Homo sapiens
EMDEQIR

SEQ ID NO: 12404 - protein, 12 aa, Homo sapiens
EQAEAEVASLNR

SEQ ID NO: 12405 - protein, 13 aa, Homo sapiens
EQAEAEVASLNRR

SEQ ID NO: 12406 - protein, 8 aa, Homo sapiens
HIAEEADR

SEQ ID NO: 12407 - protein, 10 aa, Homo sapiens
IQLVEEELDR

SEQ ID NO: 12408 - protein, 14 aa, Homo sapiens
IQLVEEELDRAQER

SEQ ID NO: 12409 - protein, 14 aa, Homo sapiens
IQVLQQQADDAEER

SEQ ID NO: 12410 - protein, 17 aa, Homo sapiens
IQVLQQQADDAEERAER

SEQ ID NO: 12411 - protein, 10 aa, Homo sapiens
LVIIEGDLER

SEQ ID NO: 12412 - protein, 12 aa, Homo sapiens
MLDQTLLDLNEM

SEQ ID NO: 12413 - protein, 11 aa, Homo sapiens
RIQLVEEELDR

SEQ ID NO: 12414 - protein, 15 aa, Homo sapiens
RIQLVEEELDRAQER

SEQ ID NO: 12415 - protein, 13 aa, Homo sapiens
HESKPVNVDEATR

SEQ ID NO: 12416 - protein, 9 aa, Homo sapiens
NVFHIASQK

SEQ ID NO: 12417 - protein, 9 aa, Homo sapiens
TLTVLHPLK

SEQ ID NO: 12418 - protein, 12 aa, Homo sapiens
QYAGYDYSQQGR

SEQ ID NO: 12419 - protein, 12 aa, Homo sapiens
VYVGNLGTGAGK

SEQ ID NO: 12420 - protein, 9 aa, Homo sapiens
AFSYYGPLR

SEQ ID NO: 12421 - protein, 9 aa, Homo sapiens
GHYAYDCHR

SEQ ID NO: 12422 - protein, 21 aa, Homo sapiens
NPPGFAFVEFEDPRDAEDAVR

SEQ ID NO: 12423 - protein, 9 aa, Homo sapiens
VELSTGMPR

SEQ ID NO: 12424 - protein, 11 aa, Homo sapiens
VRVELSTGMPR

SEQ ID NO: 12425 - protein, 12 aa, Homo sapiens
SWHDVQVSSAYK

SEQ ID NO: 12426 - protein, 13 aa, Homo sapiens
EQLDNQLDAYMSK

SEQ ID NO: 12427 - protein, 10 aa, Homo sapiens
NKQPTPVNIR

SEQ ID NO: 12428 - protein, 16 aa, Homo sapiens
LAQQMENRPSVQAALK

SEQ ID NO: 12429 - protein, 13 aa, Homo sapiens
ASMQQQQQLASAR

SEQ ID NO: 12430 - protein, 20 aa, Homo sapiens
GHLDAELDAYMAQTDPETND

SEQ ID NO: 12431 - protein, 8 aa, Homo sapiens
RDSLLVAK

SEQ ID NO: 12432 - protein, 14 aa, Homo sapiens
FLESTDSFNNELKR

SEQ ID NO: 12433 - protein, 15 aa, Homo sapiens
AYHNSPAYLAYINAK

SEQ ID NO: 12434 - protein, 12 aa, Homo sapiens
KLEAELLQIEER

SEQ ID NO: 12435 - protein, 19 aa, Homo sapiens
SQSSIVPEEEQAANKGEEK

SEQ ID NO: 12436 - protein, 10 aa, Homo sapiens
AEAALEEESR

SEQ ID NO: 12437 - protein, 13 aa, Homo sapiens
IAAEIAQAEEQAR

SEQ ID NO: 12438 - protein, 7 aa, Homo sapiens
IIGGMWR

SEQ ID NO: 12439 - protein, 10 aa, Homo sapiens
LGGNPGTNSR

SEQ ID NO: 12440 - protein, 15 aa, Homo sapiens
LISEILSESVVPDVR

SEQ ID NO: 12441 - protein, 12 aa, Homo sapiens
SRAEAALEEESR

SEQ ID NO: 12442 - protein, 11 aa, Homo sapiens
KLHYNEGLNIK

SEQ ID NO: 12443 - protein, 11 aa, Homo sapiens
KLAAAEGLEPK

SEQ ID NO: 12444 - protein, 11 aa, Homo sapiens
AASTASHRPIK

SEQ ID NO: 12445 - protein, 21 aa, Homo sapiens
WDEMNILATYHPADKDYGLMK

SEQ ID NO: 12446 - protein, 10 aa, Homo sapiens
GNVDEELSKK

SEQ ID NO: 12447 - protein, 15 aa, Homo sapiens
TSTTSSMVASAEQPR

SEQ ID NO: 12448 - protein, 15 aa, Homo sapiens
KKNPEVPVNFAEFSK

SEQ ID NO: 12449 - protein, 16 aa, Homo sapiens
MSAYAFFVQTCREEHK

SEQ ID NO: 12450 - protein, 13 aa, Homo sapiens
LGEMWNNLNDSEK

SEQ ID NO: 12451 - protein, 14 aa, Homo sapiens
KLGEMWNNLNDSEK

SEQ ID NO: 12452 - protein, 13 aa, Homo sapiens
NPEVPVNFAEFSK

SEQ ID NO: 12453 - protein, 14 aa, Homo sapiens
KNPEVPVNFAEFSK

SEQ ID NO: 12454 - protein, 9 aa, Homo sapiens
YEKDVADYK

SEQ ID NO: 12455 - protein, 9 aa, Homo sapiens
EMKDYGPAK

SEQ ID NO: 12456 - protein, 16 aa, Homo sapiens
RPPSGFFLFCSEFRPK

SEQ ID NO: 12457 - protein, 13 aa, Homo sapiens
STNPGISIGDVAK

SEQ ID NO: 12458 - protein, 12 aa, Homo sapiens
MSAYAFFVQTCR

SEQ ID NO: 12459 - protein, 14 aa, Homo sapiens
LNHVAAGLVSPSLK

SEQ ID NO: 12460 - protein, 17 aa, Homo sapiens
ALIVVPYAEGVIPDEAK

SEQ ID NO: 12461 - protein, 21 aa, Homo sapiens
FHDPDSAVVAQHLTNTVFVDR

SEQ ID NO: 12462 - protein, 14 aa, Homo sapiens
KDDTDDEIAKYDGK

SEQ ID NO: 12463 - protein, 16 aa, Homo sapiens
DKGDEEEEGEEKLEEK

SEQ ID NO: 12464 - protein, 14 aa, Homo sapiens
YDGKWEVEEMKESK

SEQ ID NO: 12465 - protein, 7 aa, Homo sapiens
TYFTDKK

SEQ ID NO: 12466 - protein, 20 aa, Homo sapiens
SDAEEDGGTVSQEEEDRKPK

SEQ ID NO: 12467 - protein, 13 aa, Homo sapiens
DDTDDEIAKYDGK

SEQ ID NO: 12468 - protein, 10 aa, Homo sapiens
LNKPFLFDTK

SEQ ID NO: 12469 - protein, 15 aa, Homo sapiens
RIVDDWANDGWGLKK

SEQ ID NO: 12470 - protein, 9 aa, Homo sapiens
AKHHAISAK

SEQ ID NO: 12471 - protein, 16 aa, Homo sapiens
WKPPMIDNPSYQGIWK

SEQ ID NO: 12472 - protein, 10 aa, Homo sapiens
KPEDWDERPK

SEQ ID NO: 12473 - protein, 14 aa, Homo sapiens
IVDDWANDGWGLKK

SEQ ID NO: 12474 - protein, 18 aa, Homo sapiens
WKPPMIDNPSYQGIWKPR

SEQ ID NO: 12475 - protein, 15 aa, Homo sapiens
KIPNPDFFEDLEPFR

SEQ ID NO: 12476 - protein, 11 aa, Homo sapiens
YDGKWEVEEMK

SEQ ID NO: 12477 - protein, 10 aa, Homo sapiens
WEVEEMKESK

SEQ ID NO: 12478 - protein, 12 aa, Homo sapiens
TPELNLDQFHDK

SEQ ID NO: 12479 - protein, 19 aa, Homo sapiens
IPDPEAVKPDDWDEDAPAK

SEQ ID NO: 12480 - protein, 23 aa, Homo sapiens
TPELNLDQFHDKTPYTIMFGPDK

SEQ ID NO: 12481 - protein, 10 aa, Homo sapiens
GTLSGWILSK

SEQ ID NO: 12482 - protein, 7 aa, Homo sapiens
TGIYEEK

SEQ ID NO: 12483 - protein, 13 aa, Homo sapiens
IVDDWANDGWGLK

SEQ ID NO: 12484 - protein, 7 aa, Homo sapiens
WEVEEMK

SEQ ID NO: 12485 - protein, 21 aa, Homo sapiens
CESAPGCGVWQRPVIDNPNYK

SEQ ID NO: 12486 - protein, 11 aa, Homo sapiens
TPYTIMFGPDK

SEQ ID NO: 12487 - protein, 8 aa, Homo sapiens
QTSGMEYK

SEQ ID NO: 12488 - protein, 9 aa, Homo sapiens
PVIDNPNYK

SEQ ID NO: 12489 - protein, 9 aa, Homo sapiens
PEDWDERPK

SEQ ID NO: 12490 - protein, 9 aa, Homo sapiens
DDTDDEIAK

SEQ ID NO: 12491 - protein, 10 aa, Homo sapiens
KTDAPQPDVK

SEQ ID NO: 12492 - protein, 9 aa, Homo sapiens
AEEDEILNR

SEQ ID NO: 12493 - protein, 16 aa, Homo sapiens
APVPTGEVYFADSFDR

SEQ ID NO: 12494 - protein, 12 aa, Homo sapiens
CESAPGCGVWQR

SEQ ID NO: 12495 - protein, 8 aa, Homo sapiens
EIEDPEDR

SEQ ID NO: 12496 - protein, 7 aa, Homo sapiens
GLVLMSR

SEQ ID NO: 12497 - protein, 7 aa, Homo sapiens
HHAISAK

SEQ ID NO: 12498 - protein, 14 aa, Homo sapiens
IPNPDFFEDLEPFR

SEQ ID NO: 12499 - protein, 17 aa, Homo sapiens
SDAEEDGGTVSQEEEDR

SEQ ID NO: 12500 - protein, 21 aa, Homo sapiens
FPGLHSFAPDKPGGILMMDLK

SEQ ID NO: 12501 - protein, 14 aa, Homo sapiens
EVESVDLPHCHLIK

SEQ ID NO: 12502 - protein, 12 aa, Homo sapiens
APPTELLARPER

SEQ ID NO: 12503 - protein, 16 aa, Homo sapiens
LFVYDPNNPPSSEVLR

SEQ ID NO: 12504 - protein, 9 aa, Homo sapiens
LLIGTLYHR

SEQ ID NO: 12505 - protein, 7 aa, Homo sapiens
DKLVIGR

SEQ ID NO: 12506 - protein, 11 aa, Homo sapiens
HSPLTQMGPAK

SEQ ID NO: 12507 - protein, 9 aa, Homo sapiens
EKHLAEIKR

SEQ ID NO: 12508 - protein, 13 aa, Homo sapiens
GWQDVTATSAYKK

SEQ ID NO: 12509 - protein, 19 aa, Homo sapiens
ELAKVEEEIQTLSQVLAAK

SEQ ID NO: 12510 - protein, 12 aa, Homo sapiens
GWQDVTATSAYK

SEQ ID NO: 12511 - protein, 15 aa, Homo sapiens
VEEEIQTLSQVLAAK

SEQ ID NO: 12512 - protein, 11 aa, Homo sapiens
KLGINSLQELK

SEQ ID NO: 12513 - protein, 14 aa, Homo sapiens
ASAAFSSVGSVITK

SEQ ID NO: 12514 - protein, 10 aa, Homo sapiens
LGINSLQELK

SEQ ID NO: 12515 - protein, 10 aa, Homo sapiens
SFEEKVENLK

SEQ ID NO: 12516 - protein, 11 aa, Homo sapiens
TSETLSQAGQK

SEQ ID NO: 12517 - protein, 8 aa, Homo sapiens
EKHLAEIK

SEQ ID NO: 12518 - protein, 12 aa, Homo sapiens
KTSETLSQAGQK

SEQ ID NO: 12519 - protein, 10 aa, Homo sapiens
NVESFASMLR

SEQ ID NO: 12520 - protein, 31 aa, Homo sapiens
TDPVPEEGEDVAATISATETLSEEEQEELRR

SEQ ID NO: 12521 - protein, 15 aa, Homo sapiens
TYNQLQVIFQGIEGK

SEQ ID NO: 12522 - protein, 12 aa, Homo sapiens
FNIFYPDLIDKR

SEQ ID NO: 12523 - protein, 22 aa, Homo sapiens
LLTAHELPLDAHVLEPDEDLQR

SEQ ID NO: 12524 - protein, 9 aa, Homo sapiens
LFSELPLAK

SEQ ID NO: 12525 - protein, 12 aa, Homo sapiens
LFGEVTRPTNSK

SEQ ID NO: 12526 - protein, 9 aa, Homo sapiens
SSLSEYAFR

SEQ ID NO: 12527 - protein, 10 aa, Homo sapiens
LPTPTPQVVK

SEQ ID NO: 12528 - protein, 11 aa, Homo sapiens
IPLYPSEEAPK

SEQ ID NO: 12529 - protein, 11 aa, Homo sapiens
DVKPKPIADAK

SEQ ID NO: 12530 - protein, 14 aa, Homo sapiens
KCSLPAEEDSVLEK

SEQ ID NO: 12531 - protein, 21 aa, Homo sapiens
ADLSLADALTEPSPDIEGEIK

SEQ ID NO: 12532 - protein, 9 aa, Homo sapiens
DMGPPKENK

SEQ ID NO: 12533 - protein, 14 aa, Homo sapiens
DMESPTKLDVTLAK

SEQ ID NO: 12534 - protein, 14 aa, Homo sapiens
DMAQLPETEIAPAK

SEQ ID NO: 12535 - protein, 21 aa, Homo sapiens
DFIATLEAEAFDDVVGETVGK

SEQ ID NO: 12536 - protein, 16 aa, Homo sapiens
TTDMAPSKETEMALAK

SEQ ID NO: 12537 - protein, 7 aa, Homo sapiens
DMALATK

SEQ ID NO: 12538 - protein, 16 aa, Homo sapiens
KPMSLASGLVPAAPPK

SEQ ID NO: 12539 - protein, 26 aa, Homo sapiens
ALPLEAEVAPVKDMAQLPETEIAPAK

SEQ ID NO: 12540 - protein, 7 aa, Homo sapiens
TEVALAK

SEQ ID NO: 12541 - protein, 14 aa, Homo sapiens
DVTPPPETEVVLIK

SEQ ID NO: 12542 - protein, 14 aa, Homo sapiens
DMSPLSETEMALGK

SEQ ID NO: 12543 - protein, 20 aa, Homo sapiens
NVVLPTETEVAPAKDVTLLK

SEQ ID NO: 12544 - protein, 25 aa, Homo sapiens
DVPPLSETEATPVPIKDMEIAQTQK

SEQ ID NO: 12545 - protein, 22 aa, Homo sapiens
EIEMASEERPPAQALEIMMGLK

SEQ ID NO: 12546 - protein, 9 aa, Homo sapiens
PSTTPFIDK

SEQ ID NO: 12547 - protein, 8 aa, Homo sapiens
ETEMALAK

SEQ ID NO: 12548 - protein, 18 aa, Homo sapiens
KTTTLSGTAPAAGVVPSR

SEQ ID NO: 12549 - protein, 8 aa, Homo sapiens
DMELPTEK

SEQ ID NO: 12550 - protein, 21 aa, Homo sapiens
NVCLPPEMEVALTEDQVPALK

SEQ ID NO: 12551 - protein, 8 aa, Homo sapiens
SPSTLLPK

SEQ ID NO: 12552 - protein, 9 aa, Homo sapiens
ELPPSPEKK

SEQ ID NO: 12553 - protein, 12 aa, Homo sapiens
QPAPTTIGGLNK

SEQ ID NO: 12554 - protein, 7 aa, Homo sapiens
PSILPSK

SEQ ID NO: 12555 - protein, 22 aa, Homo sapiens
ADLSLADALTEPSPDIEGEIKR

SEQ ID NO: 12556 - protein, 13 aa, Homo sapiens
CSLPAEEDSVLEK

SEQ ID NO: 12557 - protein, 13 aa, Homo sapiens
HVPGGGNVQIQNK

SEQ ID NO: 12558 - protein, 14 aa, Homo sapiens
DGVLTLANNVTPAK

SEQ ID NO: 12559 - protein, 16 aa, Homo sapiens
ATPMPSRPSTTPFIDK

SEQ ID NO: 12560 - protein, 11 aa, Homo sapiens
LATNTSAPDLK

SEQ ID NO: 12561 - protein, 12 aa, Homo sapiens
TDYIPLLDVDEK

SEQ ID NO: 12562 - protein, 11 aa, Homo sapiens
WPTETDVSSAK

SEQ ID NO: 12563 - protein, 16 aa, Homo sapiens
DVPPLSETEATPVPIK

SEQ ID NO: 12564 - protein, 13 aa, Homo sapiens
ASPSKPASAPASR

SEQ ID NO: 12565 - protein, 12 aa, Homo sapiens
ALPLEAEVAPVK

SEQ ID NO: 12566 - protein, 31 aa, Homo sapiens
MYHDDDLADLVFPSSATADTSIFAGQNDPLK

SEQ ID NO: 12567 - protein, 17 aa, Homo sapiens
VGSLDNVGHLPAGGAVK

SEQ ID NO: 12568 - protein, 9 aa, Homo sapiens
VSYSHIQSK

SEQ ID NO: 12569 - protein, 14 aa, Homo sapiens
DMQPSMESDMALVK

SEQ ID NO: 12570 - protein, 14 aa, Homo sapiens
DMTLPPETNVILTK

SEQ ID NO: 12571 - protein, 34 aa, Homo sapiens
GISEDSHLESLQDVGQSAAPTFMISPETVTGTGK

SEQ ID NO: 12572 - protein, 11 aa, Homo sapiens
TKPLATTQPAK

SEQ ID NO: 12573 - protein, 10 aa, Homo sapiens
TAGPIASAQK

SEQ ID NO: 12574 - protein, 14 aa, Homo sapiens
NVVLPTETEVAPAK

SEQ ID NO: 12575 - protein, 14 aa, Homo sapiens
EAQTLDSQIQETSI

SEQ ID NO: 12576 - protein, 15 aa, Homo sapiens
TTTAAAVASTGPSSR

SEQ ID NO: 12577 - protein, 17 aa, Homo sapiens
TTTLSGTAPAAGVVPSR

SEQ ID NO: 12578 - protein, 10 aa, Homo sapiens
ESQEMDARPK

SEQ ID NO: 12579 - protein, 11 aa, Homo sapiens
SAFIGIGFTDR

SEQ ID NO: 12580 - protein, 13 aa, Homo sapiens
LDIISEDISELQK

SEQ ID NO: 12581 - protein, 19 aa, Homo sapiens
QLLQNPPAGVDPIIWEQAK

SEQ ID NO: 12582 - protein, 17 aa, Homo sapiens
VQLDTIQGELNAPTQFK

SEQ ID NO: 12583 - protein, 12 aa, Homo sapiens
SQQQQLVESLHK

SEQ ID NO: 12584 - protein, 12 aa, Homo sapiens
WNQLQAFWGTGK

SEQ ID NO: 12585 - protein, 9 aa, Homo sapiens
LNELMSQIR

SEQ ID NO: 12586 - protein, 13 aa, Homo sapiens
LVEHGLNETIHIR

SEQ ID NO: 12587 - protein, 13 aa, Homo sapiens
SGYAIQADEEQLR

SEQ ID NO: 12588 - protein, 8 aa, Homo sapiens
LADHFGGK

SEQ ID NO: 12589 - protein, 10 aa, Homo sapiens
VHELNEEIGK

SEQ ID NO: 12590 - protein, 8 aa, Homo sapiens
MDLGECLK

SEQ ID NO: 12591 - protein, 8 aa, Homo sapiens
ADYEIASK

SEQ ID NO: 12592 - protein, 15 aa, Homo sapiens
LAETQEEISAEVAAK

SEQ ID NO: 12593 - protein, 12 aa, Homo sapiens
NSMPASSFQQQK

SEQ ID NO: 12594 - protein, 15 aa, Homo sapiens
VEQLGAEGNVEESQK

SEQ ID NO: 12595 - protein, 11 aa, Homo sapiens
AMLDQLMGTSR

SEQ ID NO: 12596 - protein, 11 aa, Homo sapiens
FRDQDLASCDR

SEQ ID NO: 12597 - protein, 9 aa, Homo sapiens
LHLGFIEIR

SEQ ID NO: 12598 - protein, 16 aa, Homo sapiens
SHLLNCCPHDVLSGTR

SEQ ID NO: 12599 - protein, 17 aa, Homo sapiens
VCEVCSAYLGLHDNDRR

SEQ ID NO: 12600 - protein, 7 aa, Homo sapiens
VHDLALR

SEQ ID NO: 12601 - protein, 13 aa, Homo sapiens
AEHQQDSEDLFKK

SEQ ID NO: 12602 - protein, 16 aa, Homo sapiens
EGVIGVTEEQVHHIVK

SEQ ID NO: 12603 - protein, 12 aa, Homo sapiens
AEHQQDSEDLFK

SEQ ID NO: 12604 - protein, 11 aa, Homo sapiens
ILTHVAEMQGK

SEQ ID NO: 12605 - protein, 13 aa, Homo sapiens
IRPTAVTLEHVPK

SEQ ID NO: 12606 - protein, 14 aa, Homo sapiens
AGSLLWMVATSPGR

SEQ ID NO: 12607 - protein, 17 aa, Homo sapiens
DDVESQFPAWISQFLAR

SEQ ID NO: 12608 - protein, 8 aa, Homo sapiens
EEMQAQLR

SEQ ID NO: 12609 - protein, 19 aa, Homo sapiens
IGLADYALESGGASVISTR

SEQ ID NO: 12610 - protein, 15 aa, Homo sapiens
ILTNWGHPEYTCIYR

SEQ ID NO: 12611 - protein, 9 aa, Homo sapiens
IQEELSALR

SEQ ID NO: 12612 - protein, 18 aa, Homo sapiens
LEDQLAGLQQELAALALK

SEQ ID NO: 12613 - protein, 15 aa, Homo sapiens
LTTAASLLDVFVLTR

SEQ ID NO: 12614 - protein, 27 aa, Homo sapiens
QGAPGQGGGGGLSHEDTLALLEGLVSR

SEQ ID NO: 12615 - protein, 19 aa, Homo sapiens
QSSVAEEVGLLPQQIQAVR

SEQ ID NO: 12616 - protein, 9 aa, Homo sapiens
RPDEGWEAR

SEQ ID NO: 12617 - protein, 17 aa, Homo sapiens
SSLEELHGDANWGEDLR

SEQ ID NO: 12618 - protein, 25 aa, Homo sapiens
VILQPDVHPGNCWAFQGPQGFAVVR

SEQ ID NO: 12619 - protein, 14 aa, Homo sapiens
ISAPTPEEKEEWIK

SEQ ID NO: 12620 - protein, 10 aa, Homo sapiens
DPFYEMLAAR

SEQ ID NO: 12621 - protein, 11 aa, Homo sapiens
GIIPLENLSIR

SEQ ID NO: 12622 - protein, 7 aa, Homo sapiens
QFLWSFR

SEQ ID NO: 12623 - protein, 12 aa, Homo sapiens
FEEEIKAEQEER

SEQ ID NO: 12624 - protein, 10 aa, Homo sapiens
DGFIDLMELK

SEQ ID NO: 12625 - protein, 11 aa, Homo sapiens
LGAPQTHLGLK

SEQ ID NO: 12626 - protein, 9 aa, Homo sapiens
VFNPYTEFK

SEQ ID NO: 12627 - protein, 10 aa, Homo sapiens
RVFNPYTEFK

SEQ ID NO: 12628 - protein, 9 aa, Homo sapiens
EVDEDFDSK

SEQ ID NO: 12629 - protein, 17 aa, Homo sapiens
AAAGELQEDSGLCVLAR

SEQ ID NO: 12630 - protein, 15 aa, Homo sapiens
ADLNQGIGEPQSPSR

SEQ ID NO: 12631 - protein, 16 aa, Homo sapiens
RADLNQGIGEPQSPSR

SEQ ID NO: 12632 - protein, 9 aa, Homo sapiens
VQAINVSSR

SEQ ID NO: 12633 - protein, 19 aa, Homo sapiens
AREEEEQKEGGDGAAGDPK

SEQ ID NO: 12634 - protein, 11 aa, Homo sapiens
KVTQLDLDGPK

SEQ ID NO: 12635 - protein, 10 aa, Homo sapiens
VTQLDLDGPK

SEQ ID NO: 12636 - protein, 16 aa, Homo sapiens
QYTSPEEIDAQLQAEK

SEQ ID NO: 12637 - protein, 14 aa, Homo sapiens
KGVEGLIDIENPNR

SEQ ID NO: 12638 - protein, 8 aa, Homo sapiens
MQSLSLNK

SEQ ID NO: 12639 - protein, 17 aa, Homo sapiens
EEEEQKEGGDGAAGDPK

SEQ ID NO: 12640 - protein, 13 aa, Homo sapiens
GVEGLIDIENPNR

SEQ ID NO: 12641 - protein, 16 aa, Homo sapiens
RSAEEEAADLPTKPTK

SEQ ID NO: 12642 - protein, 16 aa, Homo sapiens
AGAAGGPEEEAEKPVK

SEQ ID NO: 12643 - protein, 8 aa, Homo sapiens
KASAISIK

SEQ ID NO: 12644 - protein, 9 aa, Homo sapiens
ETVPTLAPK

SEQ ID NO: 12645 - protein, 15 aa, Homo sapiens
SAEEEAADLPTKPTK

SEQ ID NO: 12646 - protein, 13 aa, Homo sapiens
DTPTSAGPNSFNK

SEQ ID NO: 12647 - protein, 11 aa, Homo sapiens
FGFAIGSQTTK

SEQ ID NO: 12648 - protein, 11 aa, Homo sapiens
SHLGNVHDQDN

SEQ ID NO: 12649 - protein, 12 aa, Homo sapiens
TFLESPLDVGIK

SEQ ID NO: 12650 - protein, 13 aa, Homo sapiens
NIEPTEYIDDLFK

SEQ ID NO: 12651 - protein, 21 aa, Homo sapiens
SGVSLAALKKALAAAGYDVEK

SEQ ID NO: 12652 - protein, 10 aa, Homo sapiens
KAASGEAKPK

SEQ ID NO: 12653 - protein, 18 aa, Homo sapiens
ASGPPVSELITKAVAASK

SEQ ID NO: 12654 - protein, 15 aa, Homo sapiens
ALAAAGYDVEKNNSR

SEQ ID NO: 12655 - protein, 8 aa, Homo sapiens
PAAAAGAK

SEQ ID NO: 12656 - protein, 9 aa, Homo sapiens
KATGAATPK

SEQ ID NO: 12657 - protein, 9 aa, Homo sapiens
AASGEAKPK

SEQ ID NO: 12658 - protein, 9 aa, Homo sapiens
KPAAAAGAK

SEQ ID NO: 12659 - protein, 8 aa, Homo sapiens
KAASGEAK

SEQ ID NO: 12660 - protein, 10 aa, Homo sapiens
SGVSLAALKK

SEQ ID NO: 12661 - protein, 16 aa, Homo sapiens
GTLVQTKGTGASGSFK

SEQ ID NO: 12662 - protein, 13 aa, Homo sapiens
KASGPPVSELITK

SEQ ID NO: 12663 - protein, 9 aa, Homo sapiens
SGVSLAALK

SEQ ID NO: 12664 - protein, 12 aa, Homo sapiens
KALAAAGYDVEK

SEQ ID NO: 12665 - protein, 11 aa, Homo sapiens
ALAAAGYDVEK

SEQ ID NO: 12666 - protein, 12 aa, Homo sapiens
ASGPPVSELITK

SEQ ID NO: 12667 - protein, 7 aa, Homo sapiens
GTLVQTK

SEQ ID NO: 12668 - protein, 16 aa, Homo sapiens
SETAPAAPAAPAPAEK

SEQ ID NO: 12669 - protein, 12 aa, Homo sapiens
SLVSKGTLVQTK

SEQ ID NO: 12670 - protein, 20 aa, Homo sapiens
SETAPAAPAAPAPAEKTPVK

SEQ ID NO: 12671 - protein, 11 aa, Homo sapiens
KLEEEEDGKLK

SEQ ID NO: 12672 - protein, 9 aa, Homo sapiens
YYNKVPVEK

SEQ ID NO: 12673 - protein, 18 aa, Homo sapiens
NLQLFMENKQPEDDLFDR

SEQ ID NO: 12674 - protein, 7 aa, Homo sapiens
WGVPIEK

SEQ ID NO: 12675 - protein, 7 aa, Homo sapiens
ITVAWCK

SEQ ID NO: 12676 - protein, 10 aa, Homo sapiens
DEDDADYKPK

SEQ ID NO: 12677 - protein, 11 aa, Homo sapiens
EYGFCIMDNHK

SEQ ID NO: 12678 - protein, 10 aa, Homo sapiens
AEEVATFFAK

SEQ ID NO: 12679 - protein, 13 aa, Homo sapiens
TYNASITLQQQLK

SEQ ID NO: 12680 - protein, 9 aa, Homo sapiens
NLQLFMENK

SEQ ID NO: 12681 - protein, 7 aa, Homo sapiens
LEEQLMK

SEQ ID NO: 12682 - protein, 12 aa, Homo sapiens
HLQDLMEGLTAK

SEQ ID NO: 12683 - protein, 16 aa, Homo sapiens
GPVFAPPYEPLPENVK

SEQ ID NO: 12684 - protein, 8 aa, Homo sapiens
SMMNLQTK

SEQ ID NO: 12685 - protein, 20 aa, Homo sapiens
AGNEKEEGETADTVGCCSLR

SEQ ID NO: 12686 - protein, 12 aa, Homo sapiens
WWEEERYPEGIK

SEQ ID NO: 12687 - protein, 8 aa, Homo sapiens
QIALGTSK

SEQ ID NO: 12688 - protein, 12 aa, Homo sapiens
ELTAPDENIPAK

SEQ ID NO: 12689 - protein, 9 aa, Homo sapiens
AVALYFIDK

SEQ ID NO: 12690 - protein, 8 aa, Homo sapiens
NIITNLSK

SEQ ID NO: 12691 - protein, 11 aa, Homo sapiens
CDFTQMSQYFK

SEQ ID NO: 12692 - protein, 8 aa, Homo sapiens
LNTGILNK

SEQ ID NO: 12693 - protein, 9 aa, Homo sapiens
MLDHEYTTK

SEQ ID NO: 12694 - protein, 12 aa, Homo sapiens
LEVQATDREENK

SEQ ID NO: 12695 - protein, 12 aa, Homo sapiens
IMPEDIIINCSK

SEQ ID NO: 12696 - protein, 10 aa, Homo sapiens
AVAILCNHQR

SEQ ID NO: 12697 - protein, 14 aa, Homo sapiens
FAWAIDMADEDYEF

SEQ ID NO: 12698 - protein, 8 aa, Homo sapiens
LEVQATDR

SEQ ID NO: 12699 - protein, 7 aa, Homo sapiens
LNYLDPR

SEQ ID NO: 12700 - protein, 9 aa, Homo sapiens
QPEDDLFDR

SEQ ID NO: 12701 - protein, 16 aa, Homo sapiens
SGDHLHNDSQIEADFR

SEQ ID NO: 12702 - protein, 9 aa, Homo sapiens
YIMLNPSSR

SEQ ID NO: 12703 - protein, 10 aa, Homo sapiens
KNLTQDEMQR

SEQ ID NO: 12704 - protein, 14 aa, Homo sapiens
KPPKPQLMANYYNK

SEQ ID NO: 12705 - protein, 10 aa, Homo sapiens
ANEFLEVGKK

SEQ ID NO: 12706 - protein, 12 aa, Homo sapiens
QPALDVLYDVMK

SEQ ID NO: 12707 - protein, 9 aa, Homo sapiens
PLVKPGGWR

SEQ ID NO: 12708 - protein, 11 aa, Homo sapiens
LLDMDGIIVEK

SEQ ID NO: 12709 - protein, 10 aa, Homo sapiens
RANEFLEVGK

SEQ ID NO: 12710 - protein, 8 aa, Homo sapiens
LLLTPWVK

SEQ ID NO: 12711 - protein, 9 aa, Homo sapiens
PGPWRPLVK

SEQ ID NO: 12712 - protein, 7 aa, Homo sapiens
VSTVFWK

SEQ ID NO: 12713 - protein, 12 aa, Homo sapiens
FNVLQYVVPEVK

SEQ ID NO: 12714 - protein, 8 aa, Homo sapiens
IHEPIMLK

SEQ ID NO: 12715 - protein, 9 aa, Homo sapiens
ANEFLEVGK

SEQ ID NO: 12716 - protein, 7 aa, Homo sapiens
KIDYFER

SEQ ID NO: 12717 - protein, 8 aa, Homo sapiens
LEEIPLIK

SEQ ID NO: 12718 - protein, 23 aa, Homo sapiens
EQPEKEPELQQYVPQLQNNTILR

SEQ ID NO: 12719 - protein, 7 aa, Homo sapiens
EGLYQYK

SEQ ID NO: 12720 - protein, 7 aa, Homo sapiens
LKQFEER

SEQ ID NO: 12721 - protein, 14 aa, Homo sapiens
ALEVIKPAHILQEK

SEQ ID NO: 12722 - protein, 12 aa, Homo sapiens
PAYFQRPENALK

SEQ ID NO: 12723 - protein, 13 aa, Homo sapiens
EEQHQLAVTAYLK

SEQ ID NO: 12724 - protein, 11 aa, Homo sapiens
LYHDIAQQAFK

SEQ ID NO: 12725 - protein, 9 aa, Homo sapiens
ILQEHEQIK

SEQ ID NO: 12726 - protein, 7 aa, Homo sapiens
KLCDNLR

SEQ ID NO: 12727 - protein, 9 aa, Homo sapiens
NICQQVNIK

SEQ ID NO: 12728 - protein, 14 aa, Homo sapiens
IKDMDLWEQQEEER

SEQ ID NO: 12729 - protein, 12 aa, Homo sapiens
NQLTAMSSVLAK

SEQ ID NO: 12730 - protein, 14 aa, Homo sapiens
TKNETDEDGWTTVR

SEQ ID NO: 12731 - protein, 13 aa, Homo sapiens
AVEDIHGLFSLSK

SEQ ID NO: 12732 - protein, 7 aa, Homo sapiens
KLEEVER

SEQ ID NO: 12733 - protein, 10 aa, Homo sapiens
ILQEHEQIKK

SEQ ID NO: 12734 - protein, 9 aa, Homo sapiens
RLEEIPLIK

SEQ ID NO: 12735 - protein, 18 aa, Homo sapiens
DIDIEDLEELDPDFIMAK

SEQ ID NO: 12736 - protein, 8 aa, Homo sapiens
RAEEQMLK

SEQ ID NO: 12737 - protein, 10 aa, Homo sapiens
KGPEADSEWR

SEQ ID NO: 12738 - protein, 7 aa, Homo sapiens
AIVDAAR

SEQ ID NO: 12739 - protein, 10 aa, Homo sapiens
AREESWGPPR

SEQ ID NO: 12740 - protein, 11 aa, Homo sapiens
DDRVEERDPPR

SEQ ID NO: 12741 - protein, 12 aa, Homo sapiens
DMDLWEQQEEER

SEQ ID NO: 12742 - protein, 18 aa, Homo sapiens
EDAPIGPHLQSMPSEQIR

SEQ ID NO: 12743 - protein, 8 aa, Homo sapiens
EESWGPPR

SEQ ID NO: 12744 - protein, 7 aa, Homo sapiens
ELEIEER

SEQ ID NO: 12745 - protein, 18 aa, Homo sapiens
EPELQQYVPQLQNNTILR

SEQ ID NO: 12746 - protein, 7 aa, Homo sapiens
FCLQYTR

SEQ ID NO: 12747 - protein, 7 aa, Homo sapiens
FLWESYR

SEQ ID NO: 12748 - protein, 9 aa, Homo sapiens
GLDDDRGPR

SEQ ID NO: 12749 - protein, 10 aa, Homo sapiens
GPAEESSSWR

SEQ ID NO: 12750 - protein, 7 aa, Homo sapiens
HCDLQVR

SEQ ID NO: 12751 - protein, 23 aa, Homo sapiens
HHNQSTAINLNNPESQSMHLETR

SEQ ID NO: 12752 - protein, 9 aa, Homo sapiens
IGLINDMVR

SEQ ID NO: 12753 - protein, 8 aa, Homo sapiens
ITTMQLER

SEQ ID NO: 12754 - protein, 13 aa, Homo sapiens
LATLLGLQAPPTR

SEQ ID NO: 12755 - protein, 8 aa, Homo sapiens
LESLNIQR

SEQ ID NO: 12756 - protein, 8 aa, Homo sapiens
LGDSSLSR

SEQ ID NO: 12757 - protein, 16 aa, Homo sapiens
LLQQVSQIYQSIEFSR

SEQ ID NO: 12758 - protein, 15 aa, Homo sapiens
LTSLVPFVDAFQLER

SEQ ID NO: 12759 - protein, 8 aa, Homo sapiens
MHLSQIQR

SEQ ID NO: 12760 - protein, 12 aa, Homo sapiens
NETDEDGWTTVR

SEQ ID NO: 12761 - protein, 9 aa, Homo sapiens
NLTQDEMQR

SEQ ID NO: 12762 - protein, 7 aa, Homo sapiens
QCLDLLR

SEQ ID NO: 12763 - protein, 9 aa, Homo sapiens
RADDDRFPR

SEQ ID NO: 12764 - protein, 11 aa, Homo sapiens
RGADDDRPSWR

SEQ ID NO: 12765 - protein, 10 aa, Homo sapiens
RGLDDDRGPR

SEQ ID NO: 12766 - protein, 10 aa, Homo sapiens
RGMDDDRGPR

SEQ ID NO: 12767 - protein, 11 aa, Homo sapiens
RGPAEESSSWR

SEQ ID NO: 12768 - protein, 14 aa, Homo sapiens
RLATLLGLQAPPTR

SEQ ID NO: 12769 - protein, 9 aa, Homo sapiens
RVPPPALSR

SEQ ID NO: 12770 - protein, 10 aa, Homo sapiens
SEREEVSSWR

SEQ ID NO: 12771 - protein, 13 aa, Homo sapiens
SGNALFHASTLHR

SEQ ID NO: 12772 - protein, 13 aa, Homo sapiens
TLSFGSDLNYATR

SEQ ID NO: 12773 - protein, 14 aa, Homo sapiens
VLLATLSIPITPER

SEQ ID NO: 12774 - protein, 20 aa, Homo sapiens
AGTLIMALHDSSDYLLESAK

SEQ ID NO: 12775 - protein, 18 aa, Homo sapiens
LRAPPNATLEHFYLTSGK

SEQ ID NO: 12776 - protein, 8 aa, Homo sapiens
MFNYAGWK

SEQ ID NO: 12777 - protein, 16 aa, Homo sapiens
APPNATLEHFYLTSGK

SEQ ID NO: 12778 - protein, 9 aa, Homo sapiens
NQDRPSLLK

SEQ ID NO: 12779 - protein, 9 aa, Homo sapiens
QVEVELLSR

SEQ ID NO: 12780 - protein, 9 aa, Homo sapiens
MDDTLFQLK

SEQ ID NO: 12781 - protein, 8 aa, Homo sapiens
VYAENAIR

SEQ ID NO: 12782 - protein, 18 aa, Homo sapiens
QQPPLGPSSSLLSLPGLK

SEQ ID NO: 12783 - protein, 10 aa, Homo sapiens
WLDMFSNWDK

SEQ ID NO: 12784 - protein, 27 aa, Homo sapiens
TAPGALTAKPPLAPKPGTTVASGVTAR

SEQ ID NO: 12785 - protein, 9 aa, Homo sapiens
AWQYLSNSK

SEQ ID NO: 12786 - protein, 20 aa, Homo sapiens
KADGPPGPHDGGDRPSAEAR

SEQ ID NO: 12787 - protein, 15 aa, Homo sapiens
ELLEQNPGKFEELER

SEQ ID NO: 12788 - protein, 28 aa, Homo sapiens
NLPQQCMQEDFLVHEVTNLPVTEALIER

SEQ ID NO: 12789 - protein, 12 aa, Homo sapiens
PGTTVASGVTAR

SEQ ID NO: 12790 - protein, 13 aa, Homo sapiens
SCQGMYETMEQLR

SEQ ID NO: 12791 - protein, 21 aa, Homo sapiens
TEEARPSPAPGPGTPTGTPTR

SEQ ID NO: 12792 - protein, 23 aa, Homo sapiens
YGFLGGSQYSGSLESSIPVDVAR

SEQ ID NO: 12793 - protein, 13 aa, Homo sapiens
AKPAEAPAAAAPK

SEQ ID NO: 12794 - protein, 9 aa, Homo sapiens
LGFMSAFVK

SEQ ID NO: 12795 - protein, 21 aa, Homo sapiens
ASAFALQEQPVVNAVIDDTTK

SEQ ID NO: 12796 - protein, 8 aa, Homo sapiens
GLVVPVIR

SEQ ID NO: 12797 - protein, 12 aa, Homo sapiens
NVEAMNFADIER

SEQ ID NO: 12798 - protein, 14 aa, Homo sapiens
TPAFAESVTEGDVR

SEQ ID NO: 12799 - protein, 11 aa, Homo sapiens
VEGGTPLFTLR

SEQ ID NO: 12800 - protein, 10 aa, Homo sapiens
SLALMYESEK

SEQ ID NO: 12801 - protein, 13 aa, Homo sapiens
GAGSAMSTDAYPK

SEQ ID NO: 12802 - protein, 10 aa, Homo sapiens
KLDDTDPVPR

SEQ ID NO: 12803 - protein, 11 aa, Homo sapiens
SVFGGLVNYFK

SEQ ID NO: 12804 - protein, 12 aa, Homo sapiens
DLPDGPDAPADR

SEQ ID NO: 12805 - protein, 14 aa, Homo sapiens
IDSNLDELSMGLGR

SEQ ID NO: 12806 - protein, 20 aa, Homo sapiens
SYNPFDDDGEDEGARPAPWR

SEQ ID NO: 12807 - protein, 11 aa, Homo sapiens
VGVASSEELAR

SEQ ID NO: 12808 - protein, 9 aa, Homo sapiens
YQASHPNLR

SEQ ID NO: 12809 - protein, 7 aa, Homo sapiens
IVLVDNK

SEQ ID NO: 12810 - protein, 15 aa, Homo sapiens
CYTAVVPLVYGGETK

SEQ ID NO: 12811 - protein, 10 aa, Homo sapiens
FVYHLSDLCK

SEQ ID NO: 12812 - protein, 8 aa, Homo sapiens
IIVPLNNR

SEQ ID NO: 12813 - protein, 12 aa, Homo sapiens
SSEDPNEDIVER

SEQ ID NO: 12814 - protein, 11 aa, Homo sapiens
NLDQSGTNVAK

SEQ ID NO: 12815 - protein, 14 aa, Homo sapiens
MNPESSIFIEDYLK

SEQ ID NO: 12816 - protein, 8 aa, Homo sapiens
LASHMVMK

SEQ ID NO: 12817 - protein, 11 aa, Homo sapiens
ALAEEVEQVHR

SEQ ID NO: 12818 - protein, 8 aa, Homo sapiens
DEADELRK

SEQ ID NO: 12819 - protein, 7 aa, Homo sapiens
ELEDHIR

SEQ ID NO: 12820 - protein, 11 aa, Homo sapiens
IHEMLQPGQDQ

SEQ ID NO: 12821 - protein, 11 aa, Homo sapiens
ISAEGGEQVER

SEQ ID NO: 12822 - protein, 11 aa, Homo sapiens
VVEGPAQAMSR

SEQ ID NO: 12823 - protein, 8 aa, Homo sapiens
YFQDQVSR

SEQ ID NO: 12824 - protein, 11 aa, Homo sapiens
IMRDPDTGNSK

SEQ ID NO: 12825 - protein, 7 aa, Homo sapiens
LYGKPIR

SEQ ID NO: 12826 - protein, 8 aa, Homo sapiens
AAGPISER

SEQ ID NO: 12827 - protein, 13 aa, Homo sapiens
LLAAQNPLSQADR

SEQ ID NO: 12828 - protein, 12 aa, Homo sapiens
SQYNFIADVVEK

SEQ ID NO: 12829 - protein, 10 aa, Homo sapiens
EPLPTLPLGR

SEQ ID NO: 12830 - protein, 24 aa, Homo sapiens
LLSGDTYEAVVTAVDPVADIATLR

SEQ ID NO: 12831 - protein, 13 aa, Homo sapiens
TAPAVVYIEILDR

SEQ ID NO: 12832 - protein, 10 aa, Homo sapiens
TQSQLAVQIR

SEQ ID NO: 12833 - protein, 9 aa, Homo sapiens
VILGSPAHR

SEQ ID NO: 12834 - protein, 13 aa, Homo sapiens
VTAGISFAIPSDR

SEQ ID NO: 12835 - protein, 22 aa, Homo sapiens
DSAAAVVVYDITNVNSFQQTTK

SEQ ID NO: 12836 - protein, 10 aa, Homo sapiens
QVSIEEGERK

SEQ ID NO: 12837 - protein, 12 aa, Homo sapiens
GSDVIIMLVGNK

SEQ ID NO: 12838 - protein, 9 aa, Homo sapiens
SREDMIDIK

SEQ ID NO: 12839 - protein, 12 aa, Homo sapiens
STGGDFGNPLRK

SEQ ID NO: 12840 - protein, 11 aa, Homo sapiens
LVFLGEQSVGK

SEQ ID NO: 12841 - protein, 12 aa, Homo sapiens
ELNVMFIETSAK

SEQ ID NO: 12842 - protein, 11 aa, Homo sapiens
LQLWDTAGQER

SEQ ID NO: 12843 - protein, 9 aa, Homo sapiens
QVSIEEGER

SEQ ID NO: 12844 - protein, 15 aa, Homo sapiens
RVAAALPGMESTQDR

SEQ ID NO: 12845 - protein, 8 aa, Homo sapiens
SLIPSYIR

SEQ ID NO: 12846 - protein, 11 aa, Homo sapiens
STGGDFGNPLR

SEQ ID NO: 12847 - protein, 7 aa, Homo sapiens
TMYLEDR

SEQ ID NO: 12848 - protein, 14 aa, Homo sapiens
VAAALPGMESTQDR

SEQ ID NO: 12849 - protein, 10 aa, Homo sapiens
HHLEAVQNAK

SEQ ID NO: 12850 - protein, 11 aa, Homo sapiens
LNHNLYEVMSK

SEQ ID NO: 12851 - protein, 20 aa, Homo sapiens
TATVSSPLTSPTSPSTLSLK

SEQ ID NO: 12852 - protein, 17 aa, Homo sapiens
FEQSASNFYQQQAEGHK

SEQ ID NO: 12853 - protein, 10 aa, Homo sapiens
AGGAAGLFAK

SEQ ID NO: 12854 - protein, 20 aa, Homo sapiens
VSETLQEIYSSEWDGHEELK

SEQ ID NO: 12855 - protein, 17 aa, Homo sapiens
TSLEVSPNPEPPEKPVR

SEQ ID NO: 12856 - protein, 16 aa, Homo sapiens
AIVWNNDLLWEDYEEK

SEQ ID NO: 12857 - protein, 23 aa, Homo sapiens
AQTVFEDLNQELLEELPILYNSR

SEQ ID NO: 12858 - protein, 15 aa, Homo sapiens
IGCYVTIFQNISNLR

SEQ ID NO: 12859 - protein, 7 aa, Homo sapiens
LADQAVR

SEQ ID NO: 12860 - protein, 8 aa, Homo sapiens
LVDYDSAR

SEQ ID NO: 12861 - protein, 7 aa, Homo sapiens
NFLSAVK

SEQ ID NO: 12862 - protein, 9 aa, Homo sapiens
SLVISPPVR

SEQ ID NO: 12863 - protein, 34 aa, Homo sapiens
SQEEVLPSSTTPSPGGALSPSGQPSSSATEVVLR

SEQ ID NO: 12864 - protein, 12 aa, Homo sapiens
TSAPPSRPPPPR

SEQ ID NO: 12865 - protein, 14 aa, Homo sapiens
LIDRENFVDIVDAK

SEQ ID NO: 12866 - protein, 26 aa, Homo sapiens
LAVEQLQSHPEAQEALGPPLNIHYLK

SEQ ID NO: 12867 - protein, 11 aa, Homo sapiens
SEGLLYVHSSR

SEQ ID NO: 12868 - protein, 18 aa, Homo sapiens
LTSIGSDEDEETETYQEK

SEQ ID NO: 12869 - protein, 22 aa, Homo sapiens
VEDPEEGAAASISQEPSLADIK

SEQ ID NO: 12870 - protein, 12 aa, Homo sapiens
EHEEAENITEGK

SEQ ID NO: 12871 - protein, 15 aa, Homo sapiens
IFTVAQLEDNSIQMK

SEQ ID NO: 12872 - protein, 9 aa, Homo sapiens
LLTFASQLK

SEQ ID NO: 12873 - protein, 10 aa, Homo sapiens
GEIIEKPSAK

SEQ ID NO: 12874 - protein, 10 aa, Homo sapiens
DLATFLYHLR

SEQ ID NO: 12875 - protein, 8 aa, Homo sapiens
DNIIPFLR

SEQ ID NO: 12876 - protein, 11 aa, Homo sapiens
LVLLNMPGPPR

SEQ ID NO: 12877 - protein, 21 aa, Homo sapiens
NPEGDENYMEFLEVLTEGLER

SEQ ID NO: 12878 - protein, 19 aa, Homo sapiens
SMEGFQDLLNMRPDQSNVR

SEQ ID NO: 12879 - protein, 25 aa, Homo sapiens
MPGGPKPGGGPGLSTPGGHPKPPHR

SEQ ID NO: 12880 - protein, 11 aa, Homo sapiens
EEYEGPNKKPR

SEQ ID NO: 12881 - protein, 8 aa, Homo sapiens
GIVEFASK

SEQ ID NO: 12882 - protein, 12 aa, Homo sapiens
RMEELHNQEMQK

SEQ ID NO: 12883 - protein, 7 aa, Homo sapiens
ALAEIAK

SEQ ID NO: 12884 - protein, 16 aa, Homo sapiens
LFVGNLPADITEDEFK

SEQ ID NO: 12885 - protein, 11 aa, Homo sapiens
YGEPGEVFINK

SEQ ID NO: 12886 - protein, 8 aa, Homo sapiens
ISDSEGFK

SEQ ID NO: 12887 - protein, 19 aa, Homo sapiens
MGGGGAMNMGDPYGSGGQK

SEQ ID NO: 12888 - protein, 10 aa, Homo sapiens
GREEYEGPNK

SEQ ID NO: 12889 - protein, 19 aa, Homo sapiens
PVIVEPLEQLDDEDGLPEK

SEQ ID NO: 12890 - protein, 11 aa, Homo sapiens
MEELHNQEMQK

SEQ ID NO: 12891 - protein, 17 aa, Homo sapiens
LFVGNLPADITEDEFKR

SEQ ID NO: 12892 - protein, 12 aa, Homo sapiens
GIVEFASKPAAR

SEQ ID NO: 12893 - protein, 20 aa, Homo sapiens
DKLESEMEDAYHEHQANLLR

SEQ ID NO: 12894 - protein, 19 aa, Homo sapiens
PGGGPGLSTPGGHPKPPHR

SEQ ID NO: 12895 - protein, 9 aa, Homo sapiens
AELDDTPMR

SEQ ID NO: 12896 - protein, 7 aa, Homo sapiens
ANLSLLR

SEQ ID NO: 12897 - protein, 8 aa, Homo sapiens
AVVIVDDR

SEQ ID NO: 12898 - protein, 13 aa, Homo sapiens
CSEGVFLLTTTPR

SEQ ID NO: 12899 - protein, 7 aa, Homo sapiens
EEEMMIR

SEQ ID NO: 12900 - protein, 7 aa, Homo sapiens
EMEEQMR

SEQ ID NO: 12901 - protein, 14 aa, Homo sapiens
FAQHGTFEYEYSQR

SEQ ID NO: 12902 - protein, 11 aa, Homo sapiens
FATHAAALSVR

SEQ ID NO: 12903 - protein, 15 aa, Homo sapiens
FGQGGAGPVGGQGPR

SEQ ID NO: 12904 - protein, 33 aa, Homo sapiens
FPPLGGGGGIGYEANPGVPPATMSGSMMGSDMR

SEQ ID NO: 12905 - protein, 12 aa, Homo sapiens
GMGPGTPAGYGR

SEQ ID NO: 12906 - protein, 18 aa, Homo sapiens
LESEMEDAYHEHQANLLR

SEQ ID NO: 12907 - protein, 7 aa, Homo sapiens
MGYMDPR

SEQ ID NO: 12908 - protein, 23 aa, Homo sapiens
NLSPYVSNELLEEAFSQFGPIER

SEQ ID NO: 12909 - protein, 22 aa, Homo sapiens
QHHPPYHQQHHQGPPPGGPGGR

SEQ ID NO: 12910 - protein, 8 aa, Homo sapiens
REEEMMIR

SEQ ID NO: 12911 - protein, 9 aa, Homo sapiens
RREEEMMIR

SEQ ID NO: 12912 - protein, 12 aa, Homo sapiens
SPPPGMGLNQNR

SEQ ID NO: 12913 - protein, 9 aa, Homo sapiens
AASGEGKPK

SEQ ID NO: 12914 - protein, 9 aa, Homo sapiens
KPATAAGTK

SEQ ID NO: 12915 - protein, 16 aa, Homo sapiens
SETAPLAPTIPAPAEK

SEQ ID NO: 12916 - protein, 12 aa, Homo sapiens
DNTIMDLQTQLK

SEQ ID NO: 12917 - protein, 25 aa, Homo sapiens
SLQADTTNTDTALTTLEEALAEKER

SEQ ID NO: 12918 - protein, 23 aa, Homo sapiens
SLQADTTNTDTALTTLEEALAEK

SEQ ID NO: 12919 - protein, 10 aa, Homo sapiens
KIENLQEQLR

SEQ ID NO: 12920 - protein, 10 aa, Homo sapiens
DLEEEIQMLK

SEQ ID NO: 12921 - protein, 12 aa, Homo sapiens
LETLTNQFSDSK

SEQ ID NO: 12922 - protein, 11 aa, Homo sapiens
LSSTQQSLAEK

SEQ ID NO: 12923 - protein, 12 aa, Homo sapiens
AAILQTEVDALR

SEQ ID NO: 12924 - protein, 11 aa, Homo sapiens
EMVLAQEESAR

SEQ ID NO: 12925 - protein, 9 aa, Homo sapiens
SAQMLEEAR

SEQ ID NO: 12926 - protein, 16 aa, Homo sapiens
TGEPCVAELTEENFQR

SEQ ID NO: 12927 - protein, 10 aa, Homo sapiens
VEPSSQSPGR

SEQ ID NO: 12928 - protein, 13 aa, Homo sapiens
PSSTITYLTDSPK

SEQ ID NO: 12929 - protein, 20 aa, Homo sapiens
RQDPGDNWEEGGGGGGGMEK

SEQ ID NO: 12930 - protein, 10 aa, Homo sapiens
AVTKDEDEWK

SEQ ID NO: 12931 - protein, 15 aa, Homo sapiens
AVTKDEDEWKELEQK

SEQ ID NO: 12932 - protein, 7 aa, Homo sapiens
SSGPWNK

SEQ ID NO: 12933 - protein, 11 aa, Homo sapiens
DEDEWKELEQK

SEQ ID NO: 12934 - protein, 19 aa, Homo sapiens
PGDGGTASAGAAGPGAATK

SEQ ID NO: 12935 - protein, 17 aa, Homo sapiens
VQAMQISSEKEEDDNEK

SEQ ID NO: 12936 - protein, 19 aa, Homo sapiens
QDPGDNWEEGGGGGGGMEK

SEQ ID NO: 12937 - protein, 18 aa, Homo sapiens
VQAMQISSEKEEDDNEKR

SEQ ID NO: 12938 - protein, 23 aa, Homo sapiens
KTPQGPPEIYSDTQFPSLQSTAK

SEQ ID NO: 12939 - protein, 22 aa, Homo sapiens
TPQGPPEIYSDTQFPSLQSTAK

SEQ ID NO: 12940 - protein, 8 aa, Homo sapiens
SLDNFFAK

SEQ ID NO: 12941 - protein, 14 aa, Homo sapiens
LQLDNQYAVLENQK

SEQ ID NO: 12942 - protein, 8 aa, Homo sapiens
EVDYSGLR

SEQ ID NO: 12943 - protein, 32 aa, Homo sapiens
TAPVQAPPAPVIVTETPEPAMTSGVYRPPGAR

SEQ ID NO: 12944 - protein, 10 aa, Homo sapiens
LRETDANLGK

SEQ ID NO: 12945 - protein, 15 aa, Homo sapiens
NELLGDDGNSSENQR

SEQ ID NO: 12946 - protein, 9 aa, Homo sapiens
GTWSTGLPK

SEQ ID NO: 12947 - protein, 9 aa, Homo sapiens
REELAPYPK

SEQ ID NO: 12948 - protein, 10 aa, Homo sapiens
LEGLPPSWYK

SEQ ID NO: 12949 - protein, 26 aa, Homo sapiens
HLEPEPEEEIIAEDYDDDPVDYEATR

SEQ ID NO: 12950 - protein, 9 aa, Homo sapiens
PLPVALQTR

SEQ ID NO: 12951 - protein, 10 aa, Homo sapiens
PYPSPGAVLR

SEQ ID NO: 12952 - protein, 15 aa, Homo sapiens
TGADTTAAGPLFQQR

SEQ ID NO: 12953 - protein, 25 aa, Homo sapiens
TGADTTAAGPLFQQRPYPSPGAVLR

SEQ ID NO: 12954 - protein, 10 aa, Homo sapiens
TVDLKPDWGK

SEQ ID NO: 12955 - protein, 10 aa, Homo sapiens
YKDAIHFYNK

SEQ ID NO: 12956 - protein, 10 aa, Homo sapiens
DPQALSEHLK

SEQ ID NO: 12957 - protein, 9 aa, Homo sapiens
ALDLDSSCK

SEQ ID NO: 12958 - protein, 8 aa, Homo sapiens
HYTEAIKR

SEQ ID NO: 12959 - protein, 7 aa, Homo sapiens
NPVIAQK

SEQ ID NO: 12960 - protein, 16 aa, Homo sapiens
TYEEGLKHEANNPQLK

SEQ ID NO: 12961 - protein, 8 aa, Homo sapiens
LILEQMQK

SEQ ID NO: 12962 - protein, 20 aa, Homo sapiens
ELDPTNMTYITNQAAVYFEK

SEQ ID NO: 12963 - protein, 19 aa, Homo sapiens
ALSVGNIDDALQCYSEAIK

SEQ ID NO: 12964 - protein, 13 aa, Homo sapiens
LAYINPDLALEEK

SEQ ID NO: 12965 - protein, 10 aa, Homo sapiens
KAAALEFLNR

SEQ ID NO: 12966 - protein, 13 aa, Homo sapiens
FMNPFNMPNLYQK

SEQ ID NO: 12967 - protein, 8 aa, Homo sapiens
GDYPQAMK

SEQ ID NO: 12968 - protein, 9 aa, Homo sapiens
AAALEFLNR

SEQ ID NO: 12969 - protein, 17 aa, Homo sapiens
AMADPEVQQIMSDPAMR

SEQ ID NO: 12970 - protein, 9 aa, Homo sapiens
EGLQNMEAR

SEQ ID NO: 12971 - protein, 16 aa, Homo sapiens
ETKPEPMEEDLPENKK

SEQ ID NO: 12972 - protein, 12 aa, Homo sapiens
LDPHNHVLYSNR

SEQ ID NO: 12973 - protein, 10 aa, Homo sapiens
LMDVGLIAIR

SEQ ID NO: 12974 - protein, 9 aa, Homo sapiens
TLLSDPTYR

SEQ ID NO: 12975 - protein, 16 aa, Homo sapiens
LLANQTGQNVFGSFLK

SEQ ID NO: 12976 - protein, 10 aa, Homo sapiens
LLLSEEEIEK

SEQ ID NO: 12977 - protein, 17 aa, Homo sapiens
LLLSEEEIEKGVEIEEK

SEQ ID NO: 12978 - protein, 7 aa, Homo sapiens
LLSPLVK

SEQ ID NO: 12979 - protein, 11 aa, Homo sapiens
RVVLVTSGGTK

SEQ ID NO: 12980 - protein, 10 aa, Homo sapiens
VVLVTSGGTK

SEQ ID NO: 12981 - protein, 7 aa, Homo sapiens
AFIISFK

SEQ ID NO: 12982 - protein, 7 aa, Homo sapiens
GVEIEEK

SEQ ID NO: 12983 - protein, 13 aa, Homo sapiens
IQSSGGPLQITMK

SEQ ID NO: 12984 - protein, 17 aa, Homo sapiens
AEMDPVAEFPQPPGAAR

SEQ ID NO: 12985 - protein, 9 aa, Homo sapiens
FLDNFSSGR

SEQ ID NO: 12986 - protein, 9 aa, Homo sapiens
HTAFIGDRN

SEQ ID NO: 12987 - protein, 8 aa, Homo sapiens
IVDNLQSR

SEQ ID NO: 12988 - protein, 7 aa, Homo sapiens
WAEVMAR

SEQ ID NO: 12989 - protein, 13 aa, Homo sapiens
CCLTYCFNKPEDK

SEQ ID NO: 12990 - protein, 15 aa, Homo sapiens
AKIQDKEGIPPDQQR

SEQ ID NO: 12991 - protein, 11 aa, Homo sapiens
MQIFVKTLTGK

SEQ ID NO: 12992 - protein, 27 aa, Homo sapiens
MQIFVKTLTGKTITLEVEPSDTIENVK

SEQ ID NO: 12993 - protein, 13 aa, Homo sapiens
IQDKEGIPPDQQR

SEQ ID NO: 12994 - protein, 16 aa, Homo sapiens
TITLEVEPSDTIENVK

SEQ ID NO: 12995 - protein, 9 aa, Homo sapiens
TLSDYNIQK

SEQ ID NO: 12996 - protein, 18 aa, Homo sapiens
TLSDYNIQKESTLHLVLR

SEQ ID NO: 12997 - protein, 19 aa, Homo sapiens
ECPSDECGAGVFMASHFDR

SEQ ID NO: 12998 - protein, 9 aa, Homo sapiens
EGIPPDQQR

SEQ ID NO: 12999 - protein, 9 aa, Homo sapiens
ESTLHLVLR

SEQ ID NO: 13000 - protein, 16 aa, Homo sapiens
KVENEDMNKDQILLEK

SEQ ID NO: 13001 - protein, 19 aa, Homo sapiens
LYPWGVVEVENPEHNDFLK

SEQ ID NO: 13002 - protein, 9 aa, Homo sapiens
VNIVPVIAK

SEQ ID NO: 13003 - protein, 17 aa, Homo sapiens
ASIPFSVVGSNQLIEAK

SEQ ID NO: 13004 - protein, 7 aa, Homo sapiens
ADTLTLK

SEQ ID NO: 13005 - protein, 11 aa, Homo sapiens
ILDEIEEHNIK

SEQ ID NO: 13006 - protein, 16 aa, Homo sapiens
LTVVDTPGYGDAINCR

SEQ ID NO: 13007 - protein, 23 aa, Homo sapiens
MQAQMQMQMQGGDGDGGALGHHV

SEQ ID NO: 13008 - protein, 7 aa, Homo sapiens
MQEMIAR

SEQ ID NO: 13009 - protein, 26 aa, Homo sapiens
QQPTQFINPETPGYVGFANLPNQVHR

SEQ ID NO: 13010 - protein, 8 aa, Homo sapiens
RMQEMIAR

SEQ ID NO: 13011 - protein, 16 aa, Homo sapiens
STLINSLFLTDLYPER

SEQ ID NO: 13012 - protein, 12 aa, Homo sapiens
TIISYIDEQFER

SEQ ID NO: 13013 - protein, 23 aa, Homo sapiens
TMLITHMQDLQEVTQDLHYENFR

SEQ ID NO: 13014 - protein, 10 aa, Homo sapiens
YLHDESGLNR

SEQ ID NO: 13015 - protein, 9 aa, Homo sapiens
ISQATAQIK

SEQ ID NO: 13016 - protein, 17 aa, Homo sapiens
LQENLQQLQHSTNQLAK

SEQ ID NO: 13017 - protein, 14 aa, Homo sapiens
QLEADILDVNQIFK

SEQ ID NO: 13018 - protein, 15 aa, Homo sapiens
DFSSIIQTCSGNIQR

SEQ ID NO: 13019 - protein, 16 aa, Homo sapiens
TGLSTLLGILYEDKER

SEQ ID NO: 13020 - protein, 13 aa, Homo sapiens
SVGWGNIFQLPFK

SEQ ID NO: 13021 - protein, 12 aa, Homo sapiens
YGNMGLPDIDSK

SEQ ID NO: 13022 - protein, 10 aa, Homo sapiens
PGPEPAGLGR

SEQ ID NO: 13023 - protein, 14 aa, Homo sapiens
TGLSTLLGILYEDK

SEQ ID NO: 13024 - protein, 11 aa, Homo sapiens
THQSHAYHMVK

SEQ ID NO: 13025 - protein, 14 aa, Homo sapiens
ESTYQGHHTPPVQK

SEQ ID NO: 13026 - protein, 17 aa, Homo sapiens
SSVNLLMANLESLPVSK

SEQ ID NO: 13027 - protein, 12 aa, Homo sapiens
PDGIGTVSVEEK

SEQ ID NO: 13028 - protein, 11 aa, Homo sapiens
FVSVLEGVLSK

SEQ ID NO: 13029 - protein, 11 aa, Homo sapiens
DMENMYIEELR

SEQ ID NO: 13030 - protein, 12 aa, Homo sapiens
HLQEIFVPLVVR

SEQ ID NO: 13031 - protein, 25 aa, Homo sapiens
LQTDQAEASRPQWGTQGDFTTTHPR

SEQ ID NO: 13032 - protein, 9 aa, Homo sapiens
QLDDEQERR

SEQ ID NO: 13033 - protein, 13 aa, Homo sapiens
GAAPNVVYTYTGK

SEQ ID NO: 13034 - protein, 16 aa, Homo sapiens
VLISSLQDCLHGIESK

SEQ ID NO: 13035 - protein, 25 aa, Homo sapiens
AVSDASAGDYGSAIETLVTAISLIK

SEQ ID NO: 13036 - protein, 14 aa, Homo sapiens
ELHGQNPVVTPCNK

SEQ ID NO: 13037 - protein, 16 aa, Homo sapiens
DYMDTLPPTVGDDVGK

SEQ ID NO: 13038 - protein, 14 aa, Homo sapiens
GFALVGVGSEASSK

SEQ ID NO: 13039 - protein, 9 aa, Homo sapiens
AISSSAISR

SEQ ID NO: 13040 - protein, 16 aa, Homo sapiens
GPPPTDPYGRPPPYDR

SEQ ID NO: 13041 - protein, 14 aa, Homo sapiens
TPLSEAEFEEIMNR

SEQ ID NO: 13042 - protein, 15 aa, Homo sapiens
APVLVALALIECGMK

SEQ ID NO: 13043 - protein, 15 aa, Homo sapiens
MNRPAPVEISYENMR

SEQ ID NO: 13044 - protein, 8 aa, Homo sapiens
YGVTTLVR

SEQ ID NO: 13045 - protein, 10 aa, Homo sapiens
QLQGFPFYGK

SEQ ID NO: 13046 - protein, 11 aa, Homo sapiens
TVEQTATTTNK

SEQ ID NO: 13047 - protein, 17 aa, Homo sapiens
MDIRPNHTIYINNMNDK

SEQ ID NO: 13048 - protein, 18 aa, Homo sapiens
HDIAFVEFENDGQAGAAR

SEQ ID NO: 13049 - protein, 19 aa, Homo sapiens
SLYALFSQFGHVVDIVALK

SEQ ID NO: 13050 - protein, 21 aa, Homo sapiens
WQHDLFDSGFGGGAGVETGGK

SEQ ID NO: 13051 - protein, 10 aa, Homo sapiens
NRPAPYSRPK

SEQ ID NO: 13052 - protein, 26 aa, Homo sapiens
QLPDKWQHDLFDSGFGGGAGVETGGK

SEQ ID NO: 13053 - protein, 13 aa, Homo sapiens
ADKMDMSLDDIIK

SEQ ID NO: 13054 - protein, 10 aa, Homo sapiens
MDMSLDDIIK

SEQ ID NO: 13055 - protein, 15 aa, Homo sapiens
PMNIQLVTSQIDAQR

SEQ ID NO: 13056 - protein, 18 aa, Homo sapiens
QQLSAEELDAQLDAYNAR

SEQ ID NO: 13057 - protein, 11 aa, Homo sapiens
SLGTADVHFER

SEQ ID NO: 13058 - protein, 15 aa, Homo sapiens
AEKENPGLTQDIIMK

SEQ ID NO: 13059 - protein, 13 aa, Homo sapiens
LIHQTNLILQTFK

SEQ ID NO: 13060 - protein, 12 aa, Homo sapiens
ENPGLTQDIIMK

SEQ ID NO: 13061 - protein, 24 aa, Homo sapiens
MAADDVEEYMIERPEPEFQDLNEK

SEQ ID NO: 13062 - protein, 11 aa, Homo sapiens
ELLDTVNNVFK

SEQ ID NO: 13063 - protein, 10 aa, Homo sapiens
AINVFVSANR

SEQ ID NO: 13064 - protein, 8 aa, Homo sapiens
IPDEINDR

SEQ ID NO: 13065 - protein, 12 aa, Homo sapiens
SVEVNFTESLLR

SEQ ID NO: 13066 - protein, 10 aa, Homo sapiens
VNLSAAQTLR

SEQ ID NO: 13067 - protein, 10 aa, Homo sapiens
LIEVTETICK

SEQ ID NO: 13068 - protein, 14 aa, Homo sapiens
GKDTSCLAEQWSGK

SEQ ID NO: 13069 - protein, 8 aa, Homo sapiens
LLDYSLHK

SEQ ID NO: 13070 - protein, 13 aa, Homo sapiens
EVIGTGYGILDQK

SEQ ID NO: 13071 - protein, 12 aa, Homo sapiens
DTSCLAEQWSGK

SEQ ID NO: 13072 - protein, 19 aa, Homo sapiens
ELGGLEGDPSPEEDEGIQK

SEQ ID NO: 13073 - protein, 18 aa, Homo sapiens
NHQEEDLTEFLCANHVLK

SEQ ID NO: 13074 - protein, 20 aa, Homo sapiens
KELGGLEGDPSPEEDEGIQK

SEQ ID NO: 13075 - protein, 12 aa, Homo sapiens
ASPLTHSPPDEL

SEQ ID NO: 13076 - protein, 15 aa, Homo sapiens
DLITQATLLYTMADK

SEQ ID NO: 13077 - protein, 13 aa, Homo sapiens
NILMFTGETEATK

SEQ ID NO: 13078 - protein, 7 aa, Homo sapiens
ELELAHR

SEQ ID NO: 13079 - protein, 15 aa, Homo sapiens
QCSDLLSQAQYHVAR

SEQ ID NO: 13080 - protein, 19 aa, Homo sapiens
VQADVPPEILNNVGALHFR

SEQ ID NO: 13081 - protein, 11 aa, Homo sapiens
TNLANVVLLLK

SEQ ID NO: 13082 - protein, 12 aa, Homo sapiens
TPQEDYVEAAVK

SEQ ID NO: 13083 - protein, 18 aa, Homo sapiens
EADLDHYSAIIMDEAHER

SEQ ID NO: 13084 - protein, 11 aa, Homo sapiens
GDTSEDASIHR

SEQ ID NO: 13085 - protein, 10 aa, Homo sapiens
GREEESDQIR

SEQ ID NO: 13086 - protein, 19 aa, Homo sapiens
IGMDALQIYPISQANANQR

SEQ ID NO: 13087 - protein, 14 aa, Homo sapiens
MSLASCGTDWDIVR

SEQ ID NO: 13088 - protein, 12 aa, Homo sapiens
SLNTDVLFGLLR

SEQ ID NO: 13089 - protein, 13 aa, Homo sapiens
SQWESPSPTPSYR

SEQ ID NO: 13090 - protein, 9 aa, Homo sapiens
YMTDGILLR

SEQ ID NO: 13091 - protein, 7 aa, Homo sapiens
SVVSFDK

SEQ ID NO: 13092 - protein, 27 aa, Homo sapiens
SEPVKEESSELEQPFAQDTSSVGPDRK

SEQ ID NO: 13093 - protein, 14 aa, Homo sapiens
FDFDACNEVPPAPK

SEQ ID NO: 13094 - protein, 15 aa, Homo sapiens
KFDFDACNEVPPAPK

SEQ ID NO: 13095 - protein, 9 aa, Homo sapiens
ADSLLAVVK

SEQ ID NO: 13096 - protein, 10 aa, Homo sapiens
ILDILGETCK

SEQ ID NO: 13097 - protein, 10 aa, Homo sapiens
RDDAYWPEAK

SEQ ID NO: 13098 - protein, 12 aa, Homo sapiens
MSSPEDDSDTKR

SEQ ID NO: 13099 - protein, 26 aa, Homo sapiens
SEPVKEESSELEQPFAQDTSSVGPDR

SEQ ID NO: 13100 - protein, 21 aa, Homo sapiens
AIEDEGGNPDEIEITSEGNKK

SEQ ID NO: 13101 - protein, 11 aa, Homo sapiens
DGWGGYGSDKR

SEQ ID NO: 13102 - protein, 20 aa, Homo sapiens
AIEDEGGNPDEIEITSEGNK

SEQ ID NO: 13103 - protein, 9 aa, Homo sapiens
DDAYWPEAK

SEQ ID NO: 13104 - protein, 8 aa, Homo sapiens
ELVEGEMK

SEQ ID NO: 13105 - protein, 15 aa, Homo sapiens
CYGFVTMSTAEEATK

SEQ ID NO: 13106 - protein, 28 aa, Homo sapiens
AETLSGLGDSGAAGAAALSSASSETGTR

SEQ ID NO: 13107 - protein, 11 aa, Homo sapiens
EPAEQPGDGER

SEQ ID NO: 13108 - protein, 7 aa, Homo sapiens
FHDFDHR

SEQ ID NO: 13109 - protein, 10 aa, Homo sapiens
GRYPDHSVDR

SEQ ID NO: 13110 - protein, 11 aa, Homo sapiens
GRYPDHSVDRR

SEQ ID NO: 13111 - protein, 7 aa, Homo sapiens
MQAQWER

SEQ ID NO: 13112 - protein, 12 aa, Homo sapiens
NFWVSGLSSTTR

SEQ ID NO: 13113 - protein, 12 aa, Homo sapiens
REPAEQPGDGER

SEQ ID NO: 13114 - protein, 7 aa, Homo sapiens
RPYDLDR

SEQ ID NO: 13115 - protein, 13 aa, Homo sapiens
SWQGTADGGMMDR

SEQ ID NO: 13116 - protein, 8 aa, Homo sapiens
YPDHSVDR

SEQ ID NO: 13117 - protein, 9 aa, Homo sapiens
YPDHSVDRR

SEQ ID NO: 13118 - protein, 14 aa, Homo sapiens
YVVLSYLGLLSQEK

SEQ ID NO: 13119 - protein, 17 aa, Homo sapiens
SSPATSLFVELDEEEVK

SEQ ID NO: 13120 - protein, 15 aa, Homo sapiens
ASSSTVPLGFHYETK

SEQ ID NO: 13121 - protein, 25 aa, Homo sapiens
HTSPVFSPANPESSMEDCLAHLGEK

SEQ ID NO: 13122 - protein, 11 aa, Homo sapiens
EPDTEVITVEK

SEQ ID NO: 13123 - protein, 17 aa, Homo sapiens
SLDKEISEAFTSTGFDR

SEQ ID NO: 13124 - protein, 16 aa, Homo sapiens
ALQMLLSQPVTYQAFR

SEQ ID NO: 13125 - protein, 26 aa, Homo sapiens
ELQEALPEAPAPLLPHITATSLLGTR

SEQ ID NO: 13126 - protein, 8 aa, Homo sapiens
QMLLELTR

SEQ ID NO: 13127 - protein, 14 aa, Homo sapiens
GALLSMDALDLTDK

SEQ ID NO: 13128 - protein, 14 aa, Homo sapiens
VTNVEWLLDALYGK

SEQ ID NO: 13129 - protein, 35 aa, Homo sapiens
DMGLQEMAGQLQAATHQGSGAAPAGIQAPPQSAAK

SEQ ID NO: 13130 - protein, 8 aa, Homo sapiens
DLLLQALR

SEQ ID NO: 13131 - protein, 12 aa, Homo sapiens
ESQSYLVEDLER

SEQ ID NO: 13132 - protein, 7 aa, Homo sapiens
LLSVPLR

SEQ ID NO: 13133 - protein, 10 aa, Homo sapiens
PGLHFIDQHR

SEQ ID NO: 13134 - protein, 11 aa, Homo sapiens
VLTDEQYQAVR

SEQ ID NO: 13135 - protein, 9 aa, Homo sapiens
DDEYDYLFK

SEQ ID NO: 13136 - protein, 21 aa, Homo sapiens
NNLSFIETSALDSTNVEEAFK

SEQ ID NO: 13137 - protein, 15 aa, Homo sapiens
DHADSNIVIMLVGNK

SEQ ID NO: 13138 - protein, 13 aa, Homo sapiens
GAVGALLVYDIAK

SEQ ID NO: 13139 - protein, 12 aa, Homo sapiens
GTRDDEYDYLFK

SEQ ID NO: 13140 - protein, 11 aa, Homo sapiens
VVLIGDSGVGK

SEQ ID NO: 13141 - protein, 8 aa, Homo sapiens
NEFNLESK

SEQ ID NO: 13142 - protein, 8 aa, Homo sapiens
AITSAYYR

SEQ ID NO: 13143 - protein, 11 aa, Homo sapiens
AQIWDTAGQER

SEQ ID NO: 13144 - protein, 9 aa, Homo sapiens
HLTYENVER

SEQ ID NO: 13145 - protein, 8 aa, Homo sapiens
NILTEIYR

SEQ ID NO: 13146 - protein, 10 aa, Homo sapiens
STIGVEFATR

SEQ ID NO: 13147 - protein, 24 aa, Homo sapiens
LADSGSVPHDSQVAEGPSVDTRPK

SEQ ID NO: 13148 - protein, 12 aa, Homo sapiens
DAVPGEAALQAR

SEQ ID NO: 13149 - protein, 19 aa, Homo sapiens
EAAENDEEEPGEATGEAVR

SEQ ID NO: 13150 - protein, 22 aa, Homo sapiens
EAAENDEEEPGEATGEAVREDR

SEQ ID NO: 13151 - protein, 14 aa, Homo sapiens
FEAQAPPSAPPAPR

SEQ ID NO: 13152 - protein, 10 aa, Homo sapiens
SNNSMAQAMK

SEQ ID NO: 13153 - protein, 19 aa, Homo sapiens
KAEAAASALADADADLEER

SEQ ID NO: 13154 - protein, 9 aa, Homo sapiens
ANIQAVSLK

SEQ ID NO: 13155 - protein, 18 aa, Homo sapiens
AEAAASALADADADLEER

SEQ ID NO: 13156 - protein, 7 aa, Homo sapiens
IMMEFER

SEQ ID NO: 13157 - protein, 8 aa, Homo sapiens
QGQMDAVR

SEQ ID NO: 13158 - protein, 15 aa, Homo sapiens
LTPQHDQIQTQPLGK

SEQ ID NO: 13159 - protein, 15 aa, Homo sapiens
EQPAVVGLDSEEMER

SEQ ID NO: 13160 - protein, 13 aa, Homo sapiens
SASPYHGFTIVNR

SEQ ID NO: 13161 - protein, 24 aa, Homo sapiens
SPLLNQPVPELSHASLIANQSPFR

SEQ ID NO: 13162 - protein, 10 aa, Homo sapiens
KGEQELAEVK

SEQ ID NO: 13163 - protein, 27 aa, Homo sapiens
SEEETSPLVTHQNPAGPVASAPELESK

SEQ ID NO: 13164 - protein, 23 aa, Homo sapiens
TTTVVNVEGDALGAGILHHLNQK

SEQ ID NO: 13165 - protein, 11 aa, Homo sapiens
KLGSEGEDLIR

SEQ ID NO: 13166 - protein, 8 aa, Homo sapiens
VEAIPNCK

SEQ ID NO: 13167 - protein, 7 aa, Homo sapiens
TYATDYK

SEQ ID NO: 13168 - protein, 11 aa, Homo sapiens
ETVDSFLDLAR

SEQ ID NO: 13169 - protein, 10 aa, Homo sapiens
LGSEGEDLIR

SEQ ID NO: 13170 - protein, 13 aa, Homo sapiens
NLFPSNLVVAAFR

SEQ ID NO: 13171 - protein, 15 aa, Homo sapiens
TQVTYLAFPGEMLLR

SEQ ID NO: 13172 - protein, 21 aa, Homo sapiens
KVAPQNDSFGTQLPPMHQQQR

SEQ ID NO: 13173 - protein, 15 aa, Homo sapiens
VDEVPDGAVKPPTNK

SEQ ID NO: 13174 - protein, 20 aa, Homo sapiens
CIEALDELASLQVTMQQAQK

SEQ ID NO: 13175 - protein, 17 aa, Homo sapiens
KQEEQMETEQQNKDEGK

SEQ ID NO: 13176 - protein, 11 aa, Homo sapiens
DFKPGDLIFAK

SEQ ID NO: 13177 - protein, 14 aa, Homo sapiens
GFNEGLWEIDNNPK

SEQ ID NO: 13178 - protein, 18 aa, Homo sapiens
NMFLVGEGDSVITQVLNK

SEQ ID NO: 13179 - protein, 8 aa, Homo sapiens
VSQVIMEK

SEQ ID NO: 13180 - protein, 9 aa, Homo sapiens
HTEMITTLK

SEQ ID NO: 13181 - protein, 8 aa, Homo sapiens
IDNLDVNR

SEQ ID NO: 13182 - protein, 9 aa, Homo sapiens
EDVSLHGYK

SEQ ID NO: 13183 - protein, 8 aa, Homo sapiens
EAFQALEK

SEQ ID NO: 13184 - protein, 16 aa, Homo sapiens
EFGGGHIKDEVFGTVK

SEQ ID NO: 13185 - protein, 13 aa, Homo sapiens
SHQTGIQASEDVK

SEQ ID NO: 13186 - protein, 13 aa, Homo sapiens
HQTLQGVAFPISR

SEQ ID NO: 13187 - protein, 7 aa, Homo sapiens
LLEIVER

SEQ ID NO: 13188 - protein, 19 aa, Homo sapiens
YLLSQSSPAPLTAAEEELR

SEQ ID NO: 13189 - protein, 13 aa, Homo sapiens
EEKPAGEEAEMEK

SEQ ID NO: 13190 - protein, 11 aa, Homo sapiens
ETPHSPPGGVK

SEQ ID NO: 13191 - protein, 19 aa, Homo sapiens
SKAPGSPLSSEGAAGEGVR

SEQ ID NO: 13192 - protein, 19 aa, Homo sapiens
LQANLTFDPAALLPGASPK

SEQ ID NO: 13193 - protein, 19 aa, Homo sapiens
AMVSPFHSPPSTPSSPGVR

SEQ ID NO: 13194 - protein, 17 aa, Homo sapiens
APGSPLSSEGAAGEGVR

SEQ ID NO: 13195 - protein, 12 aa, Homo sapiens
SQSDCGELGDFR

SEQ ID NO: 13196 - protein, 29 aa, Homo sapiens
SSEEVDGQHPAQEEVPESPQTSGPEAENR

SEQ ID NO: 13197 - protein, 16 aa, Homo sapiens
RGAPAAATAPAPTAHK

SEQ ID NO: 13198 - protein, 11 aa, Homo sapiens
AGGSAALSPSK

SEQ ID NO: 13199 - protein, 11 aa, Homo sapiens
KVPWFDQQNGR

SEQ ID NO: 13200 - protein, 15 aa, Homo sapiens
GAPAAATAPAPTAHK

SEQ ID NO: 13201 - protein, 12 aa, Homo sapiens
ALVQNDTLLQVK

SEQ ID NO: 13202 - protein, 18 aa, Homo sapiens
SVELEEALPVTTAEGMAK

SEQ ID NO: 13203 - protein, 10 aa, Homo sapiens
VPWFDQQNGR

SEQ ID NO: 13204 - protein, 10 aa, Homo sapiens
YSQLVVETIR

SEQ ID NO: 13205 - protein, 11 aa, Homo sapiens
YSQLVVETIRR

SEQ ID NO: 13206 - protein, 11 aa, Homo sapiens
AEVSPMYGVQK

SEQ ID NO: 13207 - protein, 9 aa, Homo sapiens
AVIWPQYVK

SEQ ID NO: 13208 - protein, 10 aa, Homo sapiens
EAALEPSMEK

SEQ ID NO: 13209 - protein, 10 aa, Homo sapiens
TPVLMNFMMR

SEQ ID NO: 13210 - protein, 11 aa, Homo sapiens
VATMLATGGNR

SEQ ID NO: 13211 - protein, 16 aa, Homo sapiens
VIFPYEAQNDDELTIK

SEQ ID NO: 13212 - protein, 23 aa, Homo sapiens
APEKPLHEVPSGNSLLSSETILR

SEQ ID NO: 13213 - protein, 12 aa, Homo sapiens
ITAEIFSPNDKK

SEQ ID NO: 13214 - protein, 13 aa, Homo sapiens
YATGENTVFVDTK

SEQ ID NO: 13215 - protein, 10 aa, Homo sapiens
VVLPTFILER

SEQ ID NO: 13216 - protein, 8 aa, Homo sapiens
GWSFLLGK

SEQ ID NO: 13217 - protein, 11 aa, Homo sapiens
TDKGWSFLLGK

SEQ ID NO: 13218 - protein, 9 aa, Homo sapiens
GSSLLLMLK

SEQ ID NO: 13219 - protein, 14 aa, Homo sapiens
KYFAATQFEPLAAR

SEQ ID NO: 13220 - protein, 10 aa, Homo sapiens
YISIGSEAEK

SEQ ID NO: 13221 - protein, 19 aa, Homo sapiens
NMIENSMFEEEPDVVDLAK

SEQ ID NO: 13222 - protein, 19 aa, Homo sapiens
SSVVLDDGLVQDEFSESVK

SEQ ID NO: 13223 - protein, 13 aa, Homo sapiens
IGQVHYALETTVK

SEQ ID NO: 13224 - protein, 19 aa, Homo sapiens
GLGEHEMEEDEEDYESSAK

SEQ ID NO: 13225 - protein, 10 aa, Homo sapiens
YQSVSLLDKK

SEQ ID NO: 13226 - protein, 9 aa, Homo sapiens
GFPLVTVQK

SEQ ID NO: 13227 - protein, 13 aa, Homo sapiens
ILEALASSEDVRK

SEQ ID NO: 13228 - protein, 15 aa, Homo sapiens
ANLINNIFELAGLGK

SEQ ID NO: 13229 - protein, 11 aa, Homo sapiens
INPYVLSDKDR

SEQ ID NO: 13230 - protein, 15 aa, Homo sapiens
IIRDEQYTALSNMPK

SEQ ID NO: 13231 - protein, 12 aa, Homo sapiens
ELSSYEDFLDAR

SEQ ID NO: 13232 - protein, 17 aa, Homo sapiens
EPCLHPLEPDEVEYEPR

SEQ ID NO: 13233 - protein, 12 aa, Homo sapiens
ILEALASSEDVR

SEQ ID NO: 13234 - protein, 8 aa, Homo sapiens
LFPWAQIR

SEQ ID NO: 13235 - protein, 9 aa, Homo sapiens
LGYMDLASR

SEQ ID NO: 13236 - protein, 20 aa, Homo sapiens
LLQNQIQQQTWTDEGTPSMR

SEQ ID NO: 13237 - protein, 9 aa, Homo sapiens
LPTAVVPLR

SEQ ID NO: 13238 - protein, 19 aa, Homo sapiens
THLSEVQAFFENQSEATFR

SEQ ID NO: 13239 - protein, 13 aa, Homo sapiens
YFAATQFEPLAAR

SEQ ID NO: 13240 - protein, 10 aa, Homo sapiens
ESYEVSLTQK

SEQ ID NO: 13241 - protein, 18 aa, Homo sapiens
SVPLAATSMLITQGLISK

SEQ ID NO: 13242 - protein, 10 aa, Homo sapiens
SSPPGHYYQK

SEQ ID NO: 13243 - protein, 11 aa, Homo sapiens
RSSPPGHYYQK

SEQ ID NO: 13244 - protein, 8 aa, Homo sapiens
GILSSHPK

SEQ ID NO: 13245 - protein, 12 aa, Homo sapiens
KLENSPLGEALR

SEQ ID NO: 13246 - protein, 12 aa, Homo sapiens
ADFREPNAEVPR

SEQ ID NO: 13247 - protein, 11 aa, Homo sapiens
LENSPLGEALR

SEQ ID NO: 13248 - protein, 8 aa, Homo sapiens
NITYEELR

SEQ ID NO: 13249 - protein, 16 aa, Homo sapiens
PIPHIGPDYIPTEEER

SEQ ID NO: 13250 - protein, 13 aa, Homo sapiens
VFAECNDESFWFR

SEQ ID NO: 13251 - protein, 27 aa, Homo sapiens
SMAQWLSTLPIHNFSATALTAGGTGAK

SEQ ID NO: 13252 - protein, 10 aa, Homo sapiens
APGLGLVLER

SEQ ID NO: 13253 - protein, 9 aa, Homo sapiens
EGLEFAVIR

SEQ ID NO: 13254 - protein, 10 aa, Homo sapiens
GYAPESVLER

SEQ ID NO: 13255 - protein, 11 aa, Homo sapiens
LSAETLQQVNR

SEQ ID NO: 13256 - protein, 12 aa, Homo sapiens
TIEDDLVSALVR

SEQ ID NO: 13257 - protein, 11 aa, Homo sapiens
KAEGAQNQDKK

SEQ ID NO: 13258 - protein, 10 aa, Homo sapiens
KVEGAQNQGK

SEQ ID NO: 13259 - protein, 10 aa, Homo sapiens
KAEGAQNQDK

SEQ ID NO: 13260 - protein, 10 aa, Homo sapiens
KGEGAQNQGK

SEQ ID NO: 13261 - protein, 10 aa, Homo sapiens
KAEGTQNQSK

SEQ ID NO: 13262 - protein, 19 aa, Homo sapiens
KKGEPGPPDADGPLYLPYK

SEQ ID NO: 13263 - protein, 9 aa, Homo sapiens
AEGAQNQGK

SEQ ID NO: 13264 - protein, 10 aa, Homo sapiens
AEGAQNQGQK

SEQ ID NO: 13265 - protein, 11 aa, Homo sapiens
KAEGAQNQGQK

SEQ ID NO: 13266 - protein, 7 aa, Homo sapiens
QQLSEMK

SEQ ID NO: 13267 - protein, 11 aa, Homo sapiens
ELESQVSGLEK

SEQ ID NO: 13268 - protein, 10 aa, Homo sapiens
KAEGAQNQGK

SEQ ID NO: 13269 - protein, 17 aa, Homo sapiens
GEPGPPDADGPLYLPYK

SEQ ID NO: 13270 - protein, 8 aa, Homo sapiens
EKGPTLLK

SEQ ID NO: 13271 - protein, 14 aa, Homo sapiens
HMAAASAECQNYAK

SEQ ID NO: 13272 - protein, 17 aa, Homo sapiens
SKCEELSGLHGQLQEAR

SEQ ID NO: 13273 - protein, 18 aa, Homo sapiens
KGEPGPPDADGPLYLPYK

SEQ ID NO: 13274 - protein, 12 aa, Homo sapiens
LKGELESSDQVR

SEQ ID NO: 13275 - protein, 10 aa, Homo sapiens
VGAAEEELQK

SEQ ID NO: 13276 - protein, 8 aa, Homo sapiens
KLQEQLEK

SEQ ID NO: 13277 - protein, 13 aa, Homo sapiens
LKELESQVSGLEK

SEQ ID NO: 13278 - protein, 8 aa, Homo sapiens
LHSLTQAK

SEQ ID NO: 13279 - protein, 14 aa, Homo sapiens
AQEQQQQMAELHSK

SEQ ID NO: 13280 - protein, 13 aa, Homo sapiens
AMEALATAEQACK

SEQ ID NO: 13281 - protein, 14 aa, Homo sapiens
QLLLESQSQLDAAK

SEQ ID NO: 13282 - protein, 10 aa, Homo sapiens
AGIIQDTWHK

SEQ ID NO: 13283 - protein, 13 aa, Homo sapiens
EVPMVVVPPVGAK

SEQ ID NO: 13284 - protein, 7 aa, Homo sapiens
LQEELEK

SEQ ID NO: 13285 - protein, 9 aa, Homo sapiens
GEGAPIQGK

SEQ ID NO: 13286 - protein, 13 aa, Homo sapiens
DALNQATSQVESK

SEQ ID NO: 13287 - protein, 12 aa, Homo sapiens
EHTSHLEAELEK

SEQ ID NO: 13288 - protein, 17 aa, Homo sapiens
TAGPLESSETEEASQLK

SEQ ID NO: 13289 - protein, 15 aa, Homo sapiens
HPPAPAEPSSDLASK

SEQ ID NO: 13290 - protein, 8 aa, Homo sapiens
KLTSDLGR

SEQ ID NO: 13291 - protein, 18 aa, Homo sapiens
VEPAVSSVVNSIQVLTSK

SEQ ID NO: 13292 - protein, 8 aa, Homo sapiens
GDPVAILK

SEQ ID NO: 13293 - protein, 13 aa, Homo sapiens
LLATEQEDAAVAK

SEQ ID NO: 13294 - protein, 8 aa, Homo sapiens
LIEILSEK

SEQ ID NO: 13295 - protein, 29 aa, Homo sapiens
SHVEDGDIAGAPASSPEAPPAEQDPVQLK

SEQ ID NO: 13296 - protein, 9 aa, Homo sapiens
AAILETAPK

SEQ ID NO: 13297 - protein, 8 aa, Homo sapiens
HLEEIVEK

SEQ ID NO: 13298 - protein, 8 aa, Homo sapiens
EVQQLQGK

SEQ ID NO: 13299 - protein, 12 aa, Homo sapiens
NTDVAQSPEAPK

SEQ ID NO: 13300 - protein, 9 aa, Homo sapiens
VEGITNQGK

SEQ ID NO: 13301 - protein, 9 aa, Homo sapiens
ADAAANQGK

SEQ ID NO: 13302 - protein, 9 aa, Homo sapiens
AENSQLTER

SEQ ID NO: 13303 - protein, 15 aa, Homo sapiens
CEELSGLHGQLQEAR

SEQ ID NO: 13304 - protein, 18 aa, Homo sapiens
DAQDVQASQAEADQQQTR

SEQ ID NO: 13305 - protein, 17 aa, Homo sapiens
EAEETQSTLQAECDQYR

SEQ ID NO: 13306 - protein, 13 aa, Homo sapiens
ELCHTQSSHASLR

SEQ ID NO: 13307 - protein, 10 aa, Homo sapiens
EQEITAVQAR

SEQ ID NO: 13308 - protein, 12 aa, Homo sapiens
ETSYEEALANQR

SEQ ID NO: 13309 - protein, 15 aa, Homo sapiens
IPDHDPAPNVTVLLR

SEQ ID NO: 13310 - protein, 9 aa, Homo sapiens
LQQENSILR

SEQ ID NO: 13311 - protein, 9 aa, Homo sapiens
LQSSEAEVR

SEQ ID NO: 13312 - protein, 19 aa, Homo sapiens
LREAEETQSTLQAECDQYR

SEQ ID NO: 13313 - protein, 14 aa, Homo sapiens
LTAEFEEAQTSACR

SEQ ID NO: 13314 - protein, 9 aa, Homo sapiens
QSDELALVR

SEQ ID NO: 13315 - protein, 10 aa, Homo sapiens
QVLQLQASHR

SEQ ID NO: 13316 - protein, 7 aa, Homo sapiens
RLDEVSR

SEQ ID NO: 13317 - protein, 12 aa, Homo sapiens
SIEALLEAGQAR

SEQ ID NO: 13318 - protein, 11 aa, Homo sapiens
SILAETEGMLR

SEQ ID NO: 13319 - protein, 10 aa, Homo sapiens
SVEEEEQVWR

SEQ ID NO: 13320 - protein, 16 aa, Homo sapiens
TLQEQLENGPNTQLAR

SEQ ID NO: 13321 - protein, 18 aa, Homo sapiens
TLVSTVGSMVFNEGEAQR

SEQ ID NO: 13322 - protein, 17 aa, Homo sapiens
TQLEWTEAILEDEQTQR

SEQ ID NO: 13323 - protein, 8 aa, Homo sapiens
TTQEQLAR

SEQ ID NO: 13324 - protein, 9 aa, Homo sapiens
VEGAPTQGR

SEQ ID NO: 13325 - protein, 16 aa, Homo sapiens
LPILNQPSTQIVANAK

SEQ ID NO: 13326 - protein, 11 aa, Homo sapiens
EVSDSLLTSSK

SEQ ID NO: 13327 - protein, 13 aa, Homo sapiens
DSVASTITGVMDK

SEQ ID NO: 13328 - protein, 18 aa, Homo sapiens
SELLVEQYLPLTEEELEK

SEQ ID NO: 13329 - protein, 7 aa, Homo sapiens
VTVYPSK

SEQ ID NO: 13330 - protein, 8 aa, Homo sapiens
ALVDTYCR

SEQ ID NO: 13331 - protein, 7 aa, Homo sapiens
DFLEDRR

SEQ ID NO: 13332 - protein, 9 aa, Homo sapiens
FDSDVGEYR

SEQ ID NO: 13333 - protein, 12 aa, Homo sapiens
GHSGLQPTGFLS

SEQ ID NO: 13334 - protein, 25 aa, Homo sapiens
SGEVYTCQVEHPSVTSPLTVEWSAR

SEQ ID NO: 13335 - protein, 25 aa, Homo sapiens
TQPLQHHNLLVCSVSGFYPGSIEVR

SEQ ID NO: 13336 - protein, 10 aa, Homo sapiens
YFYNQEEYVR

SEQ ID NO: 13337 - protein, 11 aa, Homo sapiens
SPEEVDKESQR

SEQ ID NO: 13338 - protein, 14 aa, Homo sapiens
VGKEDSSSTEFVEK

SEQ ID NO: 13339 - protein, 11 aa, Homo sapiens
ELSANTAAFAK

SEQ ID NO: 13340 - protein, 10 aa, Homo sapiens
WEDAQITLLK

SEQ ID NO: 13341 - protein, 11 aa, Homo sapiens
ALSQLAEVEEK

SEQ ID NO: 13342 - protein, 11 aa, Homo sapiens
EDSSSTEFVEK

SEQ ID NO: 13343 - protein, 11 aa, Homo sapiens
MNESDAWFEEK

SEQ ID NO: 13344 - protein, 14 aa, Homo sapiens
YLHVGYIVPPAPEK

SEQ ID NO: 13345 - protein, 10 aa, Homo sapiens
FSDFLGLHSK

SEQ ID NO: 13346 - protein, 10 aa, Homo sapiens
YWEAFLPEAK

SEQ ID NO: 13347 - protein, 7 aa, Homo sapiens
DFEQISK

SEQ ID NO: 13348 - protein, 14 aa, Homo sapiens
YLESLVQTQQQLIK

SEQ ID NO: 13349 - protein, 13 aa, Homo sapiens
VQQGERDFEQISK

SEQ ID NO: 13350 - protein, 14 aa, Homo sapiens
AVNTQALSGAGILR

SEQ ID NO: 13351 - protein, 24 aa, Homo sapiens
EPILSSEPSPAVTPVTPTTLIAPR

SEQ ID NO: 13352 - protein, 11 aa, Homo sapiens
HPTLLQDPDLR

SEQ ID NO: 13353 - protein, 10 aa, Homo sapiens
QFLESSELPR

SEQ ID NO: 13354 - protein, 12 aa, Homo sapiens
QQQFENLDQQLR

SEQ ID NO: 13355 - protein, 16 aa, Homo sapiens
SAAMLGNSEDHTALSR

SEQ ID NO: 13356 - protein, 10 aa, Homo sapiens
SMSAPVIFDR

SEQ ID NO: 13357 - protein, 12 aa, Homo sapiens
VGDGMNAYMAYR

SEQ ID NO: 13358 - protein, 20 aa, Homo sapiens
VTFALPDDAETEDTGVLNVK

SEQ ID NO: 13359 - protein, 32 aa, Homo sapiens
VVSNLPAITMEEVAPVSVSDAALLAPEEIKEK

SEQ ID NO: 13360 - protein, 13 aa, Homo sapiens
KPWQLQGEVTAQK

SEQ ID NO: 13361 - protein, 13 aa, Homo sapiens
LSLAEIYEQEYIK

SEQ ID NO: 13362 - protein, 17 aa, Homo sapiens
LSEMEAYLENIEKEEER

SEQ ID NO: 13363 - protein, 14 aa, Homo sapiens
TAEEENPEHVEIQK

SEQ ID NO: 13364 - protein, 11 aa, Homo sapiens
IRDQAWDDVVR

SEQ ID NO: 13365 - protein, 19 aa, Homo sapiens
GFSDKLDFLEGDQKPLAQR

SEQ ID NO: 13366 - protein, 11 aa, Homo sapiens
RPTDYFAEMAK

SEQ ID NO: 13367 - protein, 15 aa, Homo sapiens
GLLKPGLNVVLEGPK

SEQ ID NO: 13368 - protein, 22 aa, Homo sapiens
LDVTLGPVPEIGGSEAPAPQNK

SEQ ID NO: 13369 - protein, 8 aa, Homo sapiens
VQTEVLQK

SEQ ID NO: 13370 - protein, 10 aa, Homo sapiens
AVDPEDDFQR

SEQ ID NO: 13371 - protein, 7 aa, Homo sapiens
DLEWVER

SEQ ID NO: 13372 - protein, 10 aa, Homo sapiens
ESYDDVSSFR

SEQ ID NO: 13373 - protein, 9 aa, Homo sapiens
KVQTEVLQK

SEQ ID NO: 13374 - protein, 12 aa, Homo sapiens
QAQAAVLAVLPR

SEQ ID NO: 13375 - protein, 8 aa, Homo sapiens
RDLEWVER

SEQ ID NO: 13376 - protein, 17 aa, Homo sapiens
SAVGFNEMEAPTTAYKK

SEQ ID NO: 13377 - protein, 9 aa, Homo sapiens
HSSQTDAAK

SEQ ID NO: 13378 - protein, 7 aa, Homo sapiens
KREEEEK

SEQ ID NO: 13379 - protein, 10 aa, Homo sapiens
GETEKHESQR

SEQ ID NO: 13380 - protein, 18 aa, Homo sapiens
AALGYDYKGETEKHESQR

SEQ ID NO: 13381 - protein, 13 aa, Homo sapiens
SAVGFDYKGEVEK

SEQ ID NO: 13382 - protein, 16 aa, Homo sapiens
SAVGFNEMEAPTTAYK

SEQ ID NO: 13383 - protein, 13 aa, Homo sapiens
KTTPIEAASSGTR

SEQ ID NO: 13384 - protein, 13 aa, Homo sapiens
SAVGHEYVAEVEK

SEQ ID NO: 13385 - protein, 13 aa, Homo sapiens
AALGYDYKGETEK

SEQ ID NO: 13386 - protein, 10 aa, Homo sapiens
GFGGQYGIQK

SEQ ID NO: 13387 - protein, 22 aa, Homo sapiens
KISSEAWPPVGTPPSSESEPVR

SEQ ID NO: 13388 - protein, 10 aa, Homo sapiens
AKFESMAEEK

SEQ ID NO: 13389 - protein, 14 aa, Homo sapiens
CHGHFGLFPANYVK

SEQ ID NO: 13390 - protein, 23 aa, Homo sapiens
RSPEAPQPVIAMEEPAVPAPLPK

SEQ ID NO: 13391 - protein, 8 aa, Homo sapiens
SAVGFDYK

SEQ ID NO: 13392 - protein, 9 aa, Homo sapiens
FESMAEEKR

SEQ ID NO: 13393 - protein, 11 aa, Homo sapiens
EEEEKAQQVAR

SEQ ID NO: 13394 - protein, 31 aa, Homo sapiens
SVVGHDVSVSVETQGDDWDTDPDFVNDISEK

SEQ ID NO: 13395 - protein, 8 aa, Homo sapiens
AALGYDYK

SEQ ID NO: 13396 - protein, 8 aa, Homo sapiens
FESMAEEK

SEQ ID NO: 13397 - protein, 10 aa, Homo sapiens
EHPVPLLPIR

SEQ ID NO: 13398 - protein, 21 aa, Homo sapiens
ISSEAWPPVGTPPSSESEPVR

SEQ ID NO: 13399 - protein, 16 aa, Homo sapiens
QTLPEDNEEPPALPPR

SEQ ID NO: 13400 - protein, 10 aa, Homo sapiens
TEHINIHQLR

SEQ ID NO: 13401 - protein, 12 aa, Homo sapiens
TTPIEAASSGTR

SEQ ID NO: 13402 - protein, 9 aa, Homo sapiens
VSEEHDVLR

SEQ ID NO: 13403 - protein, 11 aa, Homo sapiens
MMITQGNMQLK

SEQ ID NO: 13404 - protein, 9 aa, Homo sapiens
RQQVLLLYR

SEQ ID NO: 13405 - protein, 9 aa, Homo sapiens
CNSLSTLEK

SEQ ID NO: 13406 - protein, 18 aa, Homo sapiens
EQTVSVSGAFQINTFDLR

SEQ ID NO: 13407 - protein, 12 aa, Homo sapiens
GILTVDELLAIR

SEQ ID NO: 13408 - protein, 8 aa, Homo sapiens
IPLNDLFR

SEQ ID NO: 13409 - protein, 7 aa, Homo sapiens
SHTALLR

SEQ ID NO: 13410 - protein, 9 aa, Homo sapiens
LKQENPNMR

SEQ ID NO: 13411 - protein, 8 aa, Homo sapiens
LLEEEDSK

SEQ ID NO: 13412 - protein, 10 aa, Homo sapiens
LLEEEDSKLK

SEQ ID NO: 13413 - protein, 13 aa, Homo sapiens
AAFTAFEEAQLPR

SEQ ID NO: 13414 - protein, 7 aa, Homo sapiens
RLDQLER

SEQ ID NO: 13415 - protein, 13 aa, Homo sapiens
SHLEVPLEENVNR

SEQ ID NO: 13416 - protein, 14 aa, Homo sapiens
SHLEVPLEENVNRR

SEQ ID NO: 13417 - protein, 9 aa, Homo sapiens
SPDNPMNQR

SEQ ID NO: 13418 - protein, 22 aa, Homo sapiens
TIEDAIAVLSVAEEAADRHPER

SEQ ID NO: 13419 - protein, 10 aa, Homo sapiens
VLEEGSVEAR

SEQ ID NO: 13420 - protein, 9 aa, Homo sapiens
NNEVWLIQK

SEQ ID NO: 13421 - protein, 8 aa, Homo sapiens
AEMTVFVR

SEQ ID NO: 13422 - protein, 15 aa, Homo sapiens
APEDAGPQPGSYEIR

SEQ ID NO: 13423 - protein, 13 aa, Homo sapiens
NQEQLLTLASILR

SEQ ID NO: 13424 - protein, 13 aa, Homo sapiens
TCSQMAGVVQLVK

SEQ ID NO: 13425 - protein, 10 aa, Homo sapiens
DLHNLMVDLR

SEQ ID NO: 13426 - protein, 14 aa, Homo sapiens
EDSQYLELATLEHR

SEQ ID NO: 13427 - protein, 9 aa, Homo sapiens
FSLFSAAVR

SEQ ID NO: 13428 - protein, 22 aa, Homo sapiens
GLVHAAGPGQDSGSQAGSPPTR

SEQ ID NO: 13429 - protein, 7 aa, Homo sapiens
LEAQVNR

SEQ ID NO: 13430 - protein, 8 aa, Homo sapiens
RVEELVAK

SEQ ID NO: 13431 - protein, 7 aa, Homo sapiens
LAEEQLR

SEQ ID NO: 13432 - protein, 8 aa, Homo sapiens
LIEEETAR

SEQ ID NO: 13433 - protein, 8 aa, Homo sapiens
QLLEELER

SEQ ID NO: 13434 - protein, 8 aa, Homo sapiens
LSELAVEK

SEQ ID NO: 13435 - protein, 9 aa, Homo sapiens
LFTIGGVQK

SEQ ID NO: 13436 - protein, 18 aa, Homo sapiens
SNILSDNPDFSDEADIIK

SEQ ID NO: 13437 - protein, 18 aa, Homo sapiens
TVLELQYVLDKLGDDEVR

SEQ ID NO: 13438 - protein, 12 aa, Homo sapiens
PSATSHSGSGSK

SEQ ID NO: 13439 - protein, 13 aa, Homo sapiens
QFMAETQFTSGEK

SEQ ID NO: 13440 - protein, 12 aa, Homo sapiens
YQEVTNNLEFAK

SEQ ID NO: 13441 - protein, 8 aa, Homo sapiens
QILGVIDK

SEQ ID NO: 13442 - protein, 11 aa, Homo sapiens
LNQDQLDAVSK

SEQ ID NO: 13443 - protein, 8 aa, Homo sapiens
DGYQQNFK

SEQ ID NO: 13444 - protein, 11 aa, Homo sapiens
SFMALSQDIQK

SEQ ID NO: 13445 - protein, 11 aa, Homo sapiens
TVLELQYVLDK

SEQ ID NO: 13446 - protein, 9 aa, Homo sapiens
GKLDDYQER

SEQ ID NO: 13447 - protein, 19 aa, Homo sapiens
LNEQYEHASIHLWDLLEGK

SEQ ID NO: 13448 - protein, 27 aa, Homo sapiens
GGYDGYRPSFSNTPNSGYTQSQFSAPR

SEQ ID NO: 13449 - protein, 7 aa, Homo sapiens
LDDYQER

SEQ ID NO: 13450 - protein, 7 aa, Homo sapiens
LGDDEVR

SEQ ID NO: 13451 - protein, 18 aa, Homo sapiens
TGQPMIHIYLDKETGKPK

SEQ ID NO: 13452 - protein, 15 aa, Homo sapiens
AAVEWFDGKDFQGSK

SEQ ID NO: 13453 - protein, 14 aa, Homo sapiens
GDATVSYEDPPTAK

SEQ ID NO: 13454 - protein, 12 aa, Homo sapiens
TGQPMIHIYLDK

SEQ ID NO: 13455 - protein, 9 aa, Homo sapiens
AAVEWFDGK

SEQ ID NO: 13456 - protein, 19 aa, Homo sapiens
AGDWQCPNPGCGNQNFAWR

SEQ ID NO: 13457 - protein, 15 aa, Homo sapiens
GGPGGPGGPGGPMGR

SEQ ID NO: 13458 - protein, 24 aa, Homo sapiens
QDHPSSMGVYGQESGGFSGPGENR

SEQ ID NO: 13459 - protein, 15 aa, Homo sapiens
HSQFLGYPITLYLEK

SEQ ID NO: 13460 - protein, 10 aa, Homo sapiens
WSSIPASKPR

SEQ ID NO: 13461 - protein, 16 aa, Homo sapiens
DFIDNLDRPPGSSYFR

SEQ ID NO: 13462 - protein, 7 aa, Homo sapiens
LPLPAFR

SEQ ID NO: 13463 - protein, 10 aa, Homo sapiens
LVGSDQAPGR

SEQ ID NO: 13464 - protein, 15 aa, Homo sapiens
NIPAGLQSMNQALQR

SEQ ID NO: 13465 - protein, 9 aa, Homo sapiens
QWTFNYILR

SEQ ID NO: 13466 - protein, 10 aa, Homo sapiens
SFLEDTTPAR

SEQ ID NO: 13467 - protein, 13 aa, Homo sapiens
TAAPPWPGGVSVR

SEQ ID NO: 13468 - protein, 8 aa, Homo sapiens
VILPDDVR

SEQ ID NO: 13469 - protein, 14 aa, Homo sapiens
VPTHVPVCVLGNYR

SEQ ID NO: 13470 - protein, 8 aa, Homo sapiens
QGQHWLEK

SEQ ID NO: 13471 - protein, 18 aa, Homo sapiens
GFVPYIGIVTILMNDYPK

SEQ ID NO: 13472 - protein, 9 aa, Homo sapiens
GDLLFLTNR

SEQ ID NO: 13473 - protein, 26 aa, Homo sapiens
GLMVITGSESPIVVVLSGSMEPAFHR

SEQ ID NO: 13474 - protein, 11 aa, Homo sapiens
MLSLDFLDDVR

SEQ ID NO: 13475 - protein, 12 aa, Homo sapiens
MLSLDFLDDVRR

SEQ ID NO: 13476 - protein, 8 aa, Homo sapiens
VGEIVVFR

SEQ ID NO: 13477 - protein, 10 aa, Homo sapiens
AKKPAGATPK

SEQ ID NO: 13478 - protein, 8 aa, Homo sapiens
KPAGATPK

SEQ ID NO: 13479 - protein, 11 aa, Homo sapiens
ALAAGGYDVEK

SEQ ID NO: 13480 - protein, 13 aa, Homo sapiens
KATGPPVSELITK

SEQ ID NO: 13481 - protein, 10 aa, Homo sapiens
NGLSLAALKK

SEQ ID NO: 13482 - protein, 11 aa, Homo sapiens
ERNGLSLAALK

SEQ ID NO: 13483 - protein, 12 aa, Homo sapiens
KALAAGGYDVEK

SEQ ID NO: 13484 - protein, 9 aa, Homo sapiens
NGLSLAALK

SEQ ID NO: 13485 - protein, 16 aa, Homo sapiens
SETAPAETATPAPVEK

SEQ ID NO: 13486 - protein, 12 aa, Homo sapiens
ATGPPVSELITK

SEQ ID NO: 13487 - protein, 20 aa, Homo sapiens
GGSGSHNWGTVKDELTESPK

SEQ ID NO: 13488 - protein, 15 aa, Homo sapiens
ASSLNENVDHSALLK

SEQ ID NO: 13489 - protein, 11 aa, Homo sapiens
VAPARPPPKPR

SEQ ID NO: 13490 - protein, 15 aa, Homo sapiens
SAPAAAGGDKEAAAR

SEQ ID NO: 13491 - protein, 21 aa, Homo sapiens
ERPGEQSEVAQLIQQTLEQER

SEQ ID NO: 13492 - protein, 12 aa, Homo sapiens
ISELEGNLQTLR

SEQ ID NO: 13493 - protein, 9 aa, Homo sapiens
QIIGEISKK

SEQ ID NO: 13494 - protein, 10 aa, Homo sapiens
IRDLNDEINK

SEQ ID NO: 13495 - protein, 19 aa, Homo sapiens
FIAHVPVPSQQEIEEALVR

SEQ ID NO: 13496 - protein, 14 aa, Homo sapiens
YASETLQAQSEEAR

SEQ ID NO: 13497 - protein, 15 aa, Homo sapiens
YASETLQAQSEEARR

SEQ ID NO: 13498 - protein, 10 aa, Homo sapiens
AGVETTKPSK

SEQ ID NO: 13499 - protein, 20 aa, Homo sapiens
ATLVCLISDFYPGAVTVAWK

SEQ ID NO: 13500 - protein, 18 aa, Homo sapiens
YAASSYLSLTPEQWKSHR

SEQ ID NO: 13501 - protein, 19 aa, Homo sapiens
ANPTVTLFPPSSEELQANK

SEQ ID NO: 13502 - protein, 8 aa, Homo sapiens
VTVLGQPK

SEQ ID NO: 13503 - protein, 15 aa, Homo sapiens
YAASSYLSLTPEQWK

SEQ ID NO: 13504 - protein, 15 aa, Homo sapiens
SYSCQVTHEGSTVEK

SEQ ID NO: 13505 - protein, 14 aa, Homo sapiens
KGVLETFSGTETNK

SEQ ID NO: 13506 - protein, 10 aa, Homo sapiens
EDDKPETVIK

SEQ ID NO: 13507 - protein, 15 aa, Homo sapiens
AYEDQTKPVLEYYQK

SEQ ID NO: 13508 - protein, 10 aa, Homo sapiens
VYNIEFNPPK

SEQ ID NO: 13509 - protein, 9 aa, Homo sapiens
GTEIGVLAK

SEQ ID NO: 13510 - protein, 11 aa, Homo sapiens
EDDKPETVIKR

SEQ ID NO: 13511 - protein, 8 aa, Homo sapiens
ITTHFELK

SEQ ID NO: 13512 - protein, 18 aa, Homo sapiens
AYQIDTVINLNVPFEVIK

SEQ ID NO: 13513 - protein, 12 aa, Homo sapiens
IWPYVYAFLQTK

SEQ ID NO: 13514 - protein, 7 aa, Homo sapiens
LALHELK

SEQ ID NO: 13515 - protein, 13 aa, Homo sapiens
GVLETFSGTETNK

SEQ ID NO: 13516 - protein, 11 aa, Homo sapiens
AVIMGAPGSGK

SEQ ID NO: 13517 - protein, 9 aa, Homo sapiens
HLSSGDLLR

SEQ ID NO: 13518 - protein, 14 aa, Homo sapiens
NLTQYSWLLDGFPR

SEQ ID NO: 13519 - protein, 15 aa, Homo sapiens
TVGIDDLTGEPLIQR

SEQ ID NO: 13520 - protein, 17 aa, Homo sapiens
DYSLLPLLAAAPQVGEK

SEQ ID NO: 13521 - protein, 7 aa, Homo sapiens
NSLVKAK

SEQ ID NO: 13522 - protein, 16 aa, Homo sapiens
LLELTSSYSPDVSDYK

SEQ ID NO: 13523 - protein, 16 aa, Homo sapiens
PGPGLSSQTAGAAGWR

SEQ ID NO: 13524 - protein, 10 aa, Homo sapiens
VVTDLISLIR

SEQ ID NO: 13525 - protein, 15 aa, Homo sapiens
GPGIFEDLQNYILEK

SEQ ID NO: 13526 - protein, 11 aa, Homo sapiens
WQSVEPLTGWK

SEQ ID NO: 13527 - protein, 12 aa, Homo sapiens
VDVIQEPGLSGR

SEQ ID NO: 13528 - protein, 34 aa, Homo sapiens
TDADSESDNSDNNTIFVQGLGEGVSTDQVGEFFK

SEQ ID NO: 13529 - protein, 8 aa, Homo sapiens
EFHGNIIK

SEQ ID NO: 13530 - protein, 17 aa, Homo sapiens
AAIDWFDGKEFHGNIIK

SEQ ID NO: 13531 - protein, 15 aa, Homo sapiens
NSCNQCNEPRPEDSR

SEQ ID NO: 13532 - protein, 27 aa, Homo sapiens
QSSYSQQPYNNQGQQQNMESSGSQGGR

SEQ ID NO: 13533 - protein, 16 aa, Homo sapiens
RNSCNQCNEPRPEDSR

SEQ ID NO: 13534 - protein, 18 aa, Homo sapiens
SGDWVCPNPSCGNMNFAR

SEQ ID NO: 13535 - protein, 11 aa, Homo sapiens
SSEPTEDVEPK

SEQ ID NO: 13536 - protein, 13 aa, Homo sapiens
DHSKPISNPSDNK

SEQ ID NO: 13537 - protein, 14 aa, Homo sapiens
SGAEEQGPIDGPSK

SEQ ID NO: 13538 - protein, 14 aa, Homo sapiens
SSAEAQTPEDTPNK

SEQ ID NO: 13539 - protein, 15 aa, Homo sapiens
PSAGNVSTHPSLSQR

SEQ ID NO: 13540 - protein, 14 aa, Homo sapiens
SGAEAQTPEDSPNR

SEQ ID NO: 13541 - protein, 14 aa, Homo sapiens
KNPLPPSVGVVDKK

SEQ ID NO: 13542 - protein, 12 aa, Homo sapiens
KPNEGADGQWKK

SEQ ID NO: 13543 - protein, 13 aa, Homo sapiens
ENEVEEVKEEGPK

SEQ ID NO: 13544 - protein, 11 aa, Homo sapiens
KPNEGADGQWK

SEQ ID NO: 13545 - protein, 9 aa, Homo sapiens
RFEKPLEEK

SEQ ID NO: 13546 - protein, 11 aa, Homo sapiens
EETQPPVALKK

SEQ ID NO: 13547 - protein, 16 aa, Homo sapiens
FDQLFDDESDPFEVLK

SEQ ID NO: 13548 - protein, 18 aa, Homo sapiens
SKSEEAHAEDSVMDHHFR

SEQ ID NO: 13549 - protein, 13 aa, Homo sapiens
KNPLPPSVGVVDK

SEQ ID NO: 13550 - protein, 19 aa, Homo sapiens
KPANDITSQLEINFGDLGR

SEQ ID NO: 13551 - protein, 16 aa, Homo sapiens
SAAQAAAQTNSNAAGK

SEQ ID NO: 13552 - protein, 13 aa, Homo sapiens
NPLPPSVGVVDKK

SEQ ID NO: 13553 - protein, 10 aa, Homo sapiens
SSFSHYSGLK

SEQ ID NO: 13554 - protein, 11 aa, Homo sapiens
RPDQQLQGEGK

SEQ ID NO: 13555 - protein, 11 aa, Homo sapiens
KEETQPPVALK

SEQ ID NO: 13556 - protein, 8 aa, Homo sapiens
EMTLDEWK

SEQ ID NO: 13557 - protein, 7 aa, Homo sapiens
KGFVLHK

SEQ ID NO: 13558 - protein, 8 aa, Homo sapiens
AKVEFNIR

SEQ ID NO: 13559 - protein, 10 aa, Homo sapiens
GEGGEFSVDR

SEQ ID NO: 13560 - protein, 15 aa, Homo sapiens
GEGGEFSVDRPIIDR

SEQ ID NO: 13561 - protein, 12 aa, Homo sapiens
GGSGSHNWGTVK

SEQ ID NO: 13562 - protein, 15 aa, Homo sapiens
PGHLQEGFGCVVTNR

SEQ ID NO: 13563 - protein, 16 aa, Homo sapiens
SEEAHAEDSVMDHHFR

SEQ ID NO: 13564 - protein, 18 aa, Homo sapiens
SSASAPDVDDPEAFPALA

SEQ ID NO: 13565 - protein, 12 aa, Homo sapiens
ALYIVHPTMFIK

SEQ ID NO: 13566 - protein, 12 aa, Homo sapiens
NWPSDEMPDFPK

SEQ ID NO: 13567 - protein, 14 aa, Homo sapiens
HQIVEVAGDDKYGR

SEQ ID NO: 13568 - protein, 11 aa, Homo sapiens
MPPSHQLDHSK

SEQ ID NO: 13569 - protein, 23 aa, Homo sapiens
YNMGLPVDFDQYNELHLPAVILK

SEQ ID NO: 13570 - protein, 11 aa, Homo sapiens
SSSPELVTHLK

SEQ ID NO: 13571 - protein, 23 aa, Homo sapiens
PMPPRPPLPNQQFGVSLQHLQEK

SEQ ID NO: 13572 - protein, 7 aa, Homo sapiens
DAAITLK

SEQ ID NO: 13573 - protein, 10 aa, Homo sapiens
AINPINTFTK

SEQ ID NO: 13574 - protein, 15 aa, Homo sapiens
IFYVNYLSELSEHVK

SEQ ID NO: 13575 - protein, 18 aa, Homo sapiens
MTNTNLAVVFGPNLLWAK

SEQ ID NO: 13576 - protein, 18 aa, Homo sapiens
ETVAYLQAHALTTEGIFR

SEQ ID NO: 13577 - protein, 18 aa, Homo sapiens
FLLDHQGELFPSPDPSGL

SEQ ID NO: 13578 - protein, 8 aa, Homo sapiens
IIVFSACR

SEQ ID NO: 13579 - protein, 8 aa, Homo sapiens
LEQLGIPR

SEQ ID NO: 13580 - protein, 12 aa, Homo sapiens
NPEQEPIPIVLR

SEQ ID NO: 13581 - protein, 20 aa, Homo sapiens
VPATLQVLQTLPEENYQVLR

SEQ ID NO: 13582 - protein, 10 aa, Homo sapiens
WDDPYYDIAR

SEQ ID NO: 13583 - protein, 7 aa, Homo sapiens
IHMVYSK

SEQ ID NO: 13584 - protein, 11 aa, Homo sapiens
DPIPYLPPLEK

SEQ ID NO: 13585 - protein, 10 aa, Homo sapiens
EFEVYGPIKR

SEQ ID NO: 13586 - protein, 10 aa, Homo sapiens
RQQEVETELK

SEQ ID NO: 13587 - protein, 16 aa, Homo sapiens
MWDPHNDPNAQGDAFK

SEQ ID NO: 13588 - protein, 9 aa, Homo sapiens
QQEVETELK

SEQ ID NO: 13589 - protein, 18 aa, Homo sapiens
GGGGGQDNGLEGLGNDSR

SEQ ID NO: 13590 - protein, 11 aa, Homo sapiens
GYAFIEYEHER

SEQ ID NO: 13591 - protein, 14 aa, Homo sapiens
HHNQPYCGIAPYIR

SEQ ID NO: 13592 - protein, 10 aa, Homo sapiens
RLGGGLGGTR

SEQ ID NO: 13593 - protein, 15 aa, Homo sapiens
TQFLPPNLLALFAPR

SEQ ID NO: 13594 - protein, 13 aa, Homo sapiens
YDERPGPSPLPHR

SEQ ID NO: 13595 - protein, 14 aa, Homo sapiens
GLIDVKPLGVIWGK

SEQ ID NO: 13596 - protein, 7 aa, Homo sapiens
FSEFYSK

SEQ ID NO: 13597 - protein, 10 aa, Homo sapiens
NTIMFDDIGR

SEQ ID NO: 13598 - protein, 9 aa, Homo sapiens
TLTGVLPER

SEQ ID NO: 13599 - protein, 16 aa, Homo sapiens
VDEDEEALKQLAEWVS

SEQ ID NO: 13600 - protein, 9 aa, Homo sapiens
IQQELQTAK

SEQ ID NO: 13601 - protein, 16 aa, Homo sapiens
LPSVPSTHLPAGPAPK

SEQ ID NO: 13602 - protein, 12 aa, Homo sapiens
EKGPTPEEAIQK

SEQ ID NO: 13603 - protein, 8 aa, Homo sapiens
KQEFLEQK

SEQ ID NO: 13604 - protein, 7 aa, Homo sapiens
AALQALR

SEQ ID NO: 13605 - protein, 14 aa, Homo sapiens
EAIENATTNAEVLR

SEQ ID NO: 13606 - protein, 20 aa, Homo sapiens
RFEQQLAQTDGTLSTLEFQR

SEQ ID NO: 13607 - protein, 9 aa, Homo sapiens
KAAGGATPK

SEQ ID NO: 13608 - protein, 20 aa, Homo sapiens
SETAPAAPAAAPPAEKAPVK

SEQ ID NO: 13609 - protein, 16 aa, Homo sapiens
SETAPAAPAAAPPAEK

SEQ ID NO: 13610 - protein, 15 aa, Homo sapiens
KPLTLSLHGWTGTGK

SEQ ID NO: 13611 - protein, 10 aa, Homo sapiens
VAEEMTFFPK

SEQ ID NO: 13612 - protein, 13 aa, Homo sapiens
AMFIFLSNAGAER

SEQ ID NO: 13613 - protein, 11 aa, Homo sapiens
GYEIDEDIVSR

SEQ ID NO: 13614 - protein, 10 aa, Homo sapiens
ITDVALDFWR

SEQ ID NO: 13615 - protein, 12 aa, Homo sapiens
NSGFWHSSLIDR

SEQ ID NO: 13616 - protein, 24 aa, Homo sapiens
IDDPTDSKPEDWDKPEHIPDPDAK

SEQ ID NO: 13617 - protein, 18 aa, Homo sapiens
FYGDEEKDKGLQTSQDAR

SEQ ID NO: 13618 - protein, 23 aa, Homo sapiens
CKDDEFTHLYTLIVRPDNTYEVK

SEQ ID NO: 13619 - protein, 9 aa, Homo sapiens
FYGDEEKDK

SEQ ID NO: 13620 - protein, 9 aa, Homo sapiens
KVHVIFNYK

SEQ ID NO: 13621 - protein, 22 aa, Homo sapiens
IDNSQVESGSLEDDWDFLPPKK

SEQ ID NO: 13622 - protein, 8 aa, Homo sapiens
DKQDEEQR

SEQ ID NO: 13623 - protein, 29 aa, Homo sapiens
SGTIFDNFLITNDEAYAEEFGNETWGVTK

SEQ ID NO: 13624 - protein, 15 aa, Homo sapiens
IKDPDASKPEDWDER

SEQ ID NO: 13625 - protein, 13 aa, Homo sapiens
HEQNIDCGGGYVK

SEQ ID NO: 13626 - protein, 21 aa, Homo sapiens
IDNSQVESGSLEDDWDFLPPK

SEQ ID NO: 13627 - protein, 24 aa, Homo sapiens
KPEDWDEEMDGEWEPPVIQNPEYK

SEQ ID NO: 13628 - protein, 8 aa, Homo sapiens
QIDNPDYK

SEQ ID NO: 13629 - protein, 14 aa, Homo sapiens
FYALSASFEPFSNK

SEQ ID NO: 13630 - protein, 7 aa, Homo sapiens
FVLSSGK

SEQ ID NO: 13631 - protein, 11 aa, Homo sapiens
DKGLQTSQDAR

SEQ ID NO: 13632 - protein, 8 aa, Homo sapiens
VHVIFNYK

SEQ ID NO: 13633 - protein, 13 aa, Homo sapiens
DPDASKPEDWDER

SEQ ID NO: 13634 - protein, 11 aa, Homo sapiens
GQTLVVQFTVK

SEQ ID NO: 13635 - protein, 7 aa, Homo sapiens
FYGDEEK

SEQ ID NO: 13636 - protein, 12 aa, Homo sapiens
EQFLDGDGWTSR

SEQ ID NO: 13637 - protein, 9 aa, Homo sapiens
GLQTSQDAR

SEQ ID NO: 13638 - protein, 8 aa, Homo sapiens
LDYLSSLK

SEQ ID NO: 13639 - protein, 11 aa, Homo sapiens
FTGLSKEELLK

SEQ ID NO: 13640 - protein, 21 aa, Homo sapiens
NQKDDVAQTDLLQIDPNFGSK

SEQ ID NO: 13641 - protein, 13 aa, Homo sapiens
VAEDEAEAAAAAK

SEQ ID NO: 13642 - protein, 15 aa, Homo sapiens
IKVAEDEAEAAAAAK

SEQ ID NO: 13643 - protein, 12 aa, Homo sapiens
LKLEPHEGLLLR

SEQ ID NO: 13644 - protein, 18 aa, Homo sapiens
DDVAQTDLLQIDPNFGSK

SEQ ID NO: 13645 - protein, 29 aa, Homo sapiens
EVELNELEPEKQPMNAASGAAMSLAGAEK

SEQ ID NO: 13646 - protein, 9 aa, Homo sapiens
SQDTEVDMK

SEQ ID NO: 13647 - protein, 9 aa, Homo sapiens
GLVLGPIHK

SEQ ID NO: 13648 - protein, 16 aa, Homo sapiens
GENSWFSTQVDTVATK

SEQ ID NO: 13649 - protein, 29 aa, Homo sapiens
DDVAQTDLLQIDPNFGSKEDFDSLLQSAK

SEQ ID NO: 13650 - protein, 11 aa, Homo sapiens
EDFDSLLQSAK

SEQ ID NO: 13651 - protein, 19 aa, Homo sapiens
IGDLQAFQGHGAGNLAGLK

SEQ ID NO: 13652 - protein, 20 aa, Homo sapiens
DLLLTSSYLSDSGSTGEHTK

SEQ ID NO: 13653 - protein, 10 aa, Homo sapiens
GRLDYLSSLK

SEQ ID NO: 13654 - protein, 11 aa, Homo sapiens
ADLLLSTQPGR

SEQ ID NO: 13655 - protein, 21 aa, Homo sapiens
ADLLLSTQPGREEGSPLELER

SEQ ID NO: 13656 - protein, 10 aa, Homo sapiens
EEGSPLELER

SEQ ID NO: 13657 - protein, 14 aa, Homo sapiens
GQSEDPGSLLSLFR

SEQ ID NO: 13658 - protein, 10 aa, Homo sapiens
LEPHEGLLLR

SEQ ID NO: 13659 - protein, 12 aa, Homo sapiens
LLTSFLPAQLLR

SEQ ID NO: 13660 - protein, 21 aa, Homo sapiens
SLLHGDFHAFSAGPGLFSYIR

SEQ ID NO: 13661 - protein, 9 aa, Homo sapiens
VAGSPGWVR

SEQ ID NO: 13662 - protein, 10 aa, Homo sapiens
VILDLTPNYR

SEQ ID NO: 13663 - protein, 10 aa, Homo sapiens
WCSWSLSQAR

SEQ ID NO: 13664 - protein, 9 aa, Homo sapiens
WWHTGALYR

SEQ ID NO: 13665 - protein, 18 aa, Homo sapiens
MLGGTDCRTFLTSHINLK

SEQ ID NO: 13666 - protein, 14 aa, Homo sapiens
GPPDADGPLYLPYK

SEQ ID NO: 13667 - protein, 15 aa, Homo sapiens
KGPPDADGPLYLPYK

SEQ ID NO: 13668 - protein, 12 aa, Homo sapiens
AGMQLNLEELQK

SEQ ID NO: 13669 - protein, 12 aa, Homo sapiens
AAELWGEQAEAR

SEQ ID NO: 13670 - protein, 15 aa, Homo sapiens
AQLEAHLGQVMESVR

SEQ ID NO: 13671 - protein, 13 aa, Homo sapiens
DNPTAQQIMQLLR

SEQ ID NO: 13672 - protein, 20 aa, Homo sapiens
EAMVAFFNSAVASAEEEQAR

SEQ ID NO: 13673 - protein, 12 aa, Homo sapiens
LEAATQQNQQLR

SEQ ID NO: 13674 - protein, 10 aa, Homo sapiens
LLELQELVLR

SEQ ID NO: 13675 - protein, 12 aa, Homo sapiens
MQQMSEQVHTLR

SEQ ID NO: 13676 - protein, 16 aa, Homo sapiens
GPAGDATVASEKESVM

SEQ ID NO: 13677 - protein, 11 aa, Homo sapiens
KLGPEGELLIR

SEQ ID NO: 13678 - protein, 10 aa, Homo sapiens
STEPELIQVK

SEQ ID NO: 13679 - protein, 20 aa, Homo sapiens
SELPLDPLPVPTEEGNPLLK

SEQ ID NO: 13680 - protein, 12 aa, Homo sapiens
GPAGDATVASEK

SEQ ID NO: 13681 - protein, 10 aa, Homo sapiens
CVEENNGVAK

SEQ ID NO: 13682 - protein, 11 aa, Homo sapiens
EVLDSFLDLAR

SEQ ID NO: 13683 - protein, 32 aa, Homo sapiens
GLAAAEPTANGGLALASIEDQGAAAGGYCGSR

SEQ ID NO: 13684 - protein, 13 aa, Homo sapiens
IVEMEDVGLLFAR

SEQ ID NO: 13685 - protein, 10 aa, Homo sapiens
LGPEGELLIR

SEQ ID NO: 13686 - protein, 13 aa, Homo sapiens
LSAFVFPGELLLR

SEQ ID NO: 13687 - protein, 13 aa, Homo sapiens
NIFPSNLVSAAFR

SEQ ID NO: 13688 - protein, 23 aa, Homo sapiens
SCTVLNVEGDALGAGLLQNYVDR

SEQ ID NO: 13689 - protein, 9 aa, Homo sapiens
SYSTTYEER

SEQ ID NO: 13690 - protein, 11 aa, Homo sapiens
ITKPDGIVEER

SEQ ID NO: 13691 - protein, 17 aa, Homo sapiens
DEDDDEEEEEEGGSWGR

SEQ ID NO: 13692 - protein, 32 aa, Homo sapiens
DFNSIFSDMGAWTLPSHPPELPGPESETPGER

SEQ ID NO: 13693 - protein, 9 aa, Homo sapiens
DPFFGGMTR

SEQ ID NO: 13694 - protein, 12 aa, Homo sapiens
FDDVWPMDPHPR

SEQ ID NO: 13695 - protein, 12 aa, Homo sapiens
FHDNFGFDDLVR

SEQ ID NO: 13696 - protein, 24 aa, Homo sapiens
FHSPQHPPEEFGFGFSFSPGGGIR

SEQ ID NO: 13697 - protein, 9 aa, Homo sapiens
GFFGFPGPR

SEQ ID NO: 13698 - protein, 11 aa, Homo sapiens
IFGGVLESDAR

SEQ ID NO: 13699 - protein, 18 aa, Homo sapiens
SESPQPAPDWGSQRPFHR

SEQ ID NO: 13700 - protein, 7 aa, Homo sapiens
SLFDLFR

SEQ ID NO: 13701 - protein, 8 aa, Homo sapiens
YPDSHQPR

SEQ ID NO: 13702 - protein, 26 aa, Homo sapiens
GADDAADADTAIINAEGGQNNSEEKK

SEQ ID NO: 13703 - protein, 13 aa, Homo sapiens
SDDSVIQLLNPNR

SEQ ID NO: 13704 - protein, 16 aa, Homo sapiens
GLGPSPAGDGPSGSGK

SEQ ID NO: 13705 - protein, 31 aa, Homo sapiens
QAPGLLWDASHQQEQPTSSSHHGGAGAVEIR

SEQ ID NO: 13706 - protein, 8 aa, Homo sapiens
VFQSWWDR

SEQ ID NO: 13707 - protein, 14 aa, Homo sapiens
LLYSGVPFLGPYHK

SEQ ID NO: 13708 - protein, 12 aa, Homo sapiens
GDADSVLSLTFR

SEQ ID NO: 13709 - protein, 14 aa, Homo sapiens
RHPGFEATFFQLPR

SEQ ID NO: 13710 - protein, 19 aa, Homo sapiens
YSDPTQWTAFLGLHDQSQR

SEQ ID NO: 13711 - protein, 24 aa, Homo sapiens
MEDLDQSPLVSSSDSPPRPQPAFK

SEQ ID NO: 13712 - protein, 13 aa, Homo sapiens
GPLPAAPPVAPER

SEQ ID NO: 13713 - protein, 13 aa, Homo sapiens
KFQPLFGDFAAEK

SEQ ID NO: 13714 - protein, 12 aa, Homo sapiens
QMREEDQEEAAK

SEQ ID NO: 13715 - protein, 23 aa, Homo sapiens
DDTKEWLIEVPGNADPLEDQFAK

SEQ ID NO: 13716 - protein, 12 aa, Homo sapiens
FQPLFGDFAAEK

SEQ ID NO: 13717 - protein, 8 aa, Homo sapiens
KPQLDVTR

SEQ ID NO: 13718 - protein, 8 aa, Homo sapiens
KNQLELLR

SEQ ID NO: 13719 - protein, 11 aa, Homo sapiens
MNSGPPGLGGK

SEQ ID NO: 13720 - protein, 13 aa, Homo sapiens
QMREEDQEEAAKR

SEQ ID NO: 13721 - protein, 12 aa, Homo sapiens
MEGQSVEELLAK

SEQ ID NO: 13722 - protein, 17 aa, Homo sapiens
MQLPSAAGLHPTGHQSK

SEQ ID NO: 13723 - protein, 19 aa, Homo sapiens
EWLIEVPGNADPLEDQFAK

SEQ ID NO: 13724 - protein, 17 aa, Homo sapiens
DNTQLLINQLWQLPTER

SEQ ID NO: 13725 - protein, 8 aa, Homo sapiens
VEEAIVAR

SEQ ID NO: 13726 - protein, 10 aa, Homo sapiens
SSGPPSYFIK

SEQ ID NO: 13727 - protein, 13 aa, Homo sapiens
VLVDGEEHVGFLK

SEQ ID NO: 13728 - protein, 16 aa, Homo sapiens
AVVPGVKPQDWISAAR

SEQ ID NO: 13729 - protein, 24 aa, Homo sapiens
EMEQSMNMLNSNHELPDVSEFMTR

SEQ ID NO: 13730 - protein, 10 aa, Homo sapiens
VVNTSDPDMR

SEQ ID NO: 13731 - protein, 8 aa, Homo sapiens
HLIFVLNK

SEQ ID NO: 13732 - protein, 9 aa, Homo sapiens
SPHIETYLK

SEQ ID NO: 13733 - protein, 14 aa, Homo sapiens
IKSPEDHIGAVLER

SEQ ID NO: 13734 - protein, 18 aa, Homo sapiens
IIKPLQYQSTVASGTVAR

SEQ ID NO: 13735 - protein, 13 aa, Homo sapiens
IDSWENAEDFLEK

SEQ ID NO: 13736 - protein, 13 aa, Homo sapiens
TLEEDVDDRAPSK

SEQ ID NO: 13737 - protein, 9 aa, Homo sapiens
IFAKPEEQR

SEQ ID NO: 13738 - protein, 16 aa, Homo sapiens
VHILDTESFETTFGPK

SEQ ID NO: 13739 - protein, 10 aa, Homo sapiens
DLVTEDTGVR

SEQ ID NO: 13740 - protein, 12 aa, Homo sapiens
DRDLVTEDTGVR

SEQ ID NO: 13741 - protein, 8 aa, Homo sapiens
GAFIQLLR

SEQ ID NO: 13742 - protein, 9 aa, Homo sapiens
LPMSLLHDR

SEQ ID NO: 13743 - protein, 8 aa, Homo sapiens
MVLNDWQR

SEQ ID NO: 13744 - protein, 12 aa, Homo sapiens
SPEDHIGAVLER

SEQ ID NO: 13745 - protein, 8 aa, Homo sapiens
SSVINTLR

SEQ ID NO: 13746 - protein, 9 aa, Homo sapiens
TLEEDVDDR

SEQ ID NO: 13747 - protein, 15 aa, Homo sapiens
VIDSSDVVVQVLDAR

SEQ ID NO: 13748 - protein, 10 aa, Homo sapiens
VQGAGGQNMR

SEQ ID NO: 13749 - protein, 9 aa, Homo sapiens
VWQYITLMR

SEQ ID NO: 13750 - protein, 13 aa, Homo sapiens
FLIIPLGSHPVAK

SEQ ID NO: 13751 - protein, 10 aa, Homo sapiens
DVSVPVAEIK

SEQ ID NO: 13752 - protein, 11 aa, Homo sapiens
TDLQGSASPSK

SEQ ID NO: 13753 - protein, 14 aa, Homo sapiens
SEPPVSEQLDVAGR

SEQ ID NO: 13754 - protein, 9 aa, Homo sapiens
TSDWLGYMR

SEQ ID NO: 13755 - protein, 15 aa, Homo sapiens
VAAVGGQSYLSSILR

SEQ ID NO: 13756 - protein, 14 aa, Homo sapiens
VSDEVGFGLEHVSR

SEQ ID NO: 13757 - protein, 11 aa, Homo sapiens
YSSSFLDSGWR

SEQ ID NO: 13758 - protein, 9 aa, Homo sapiens
KALELDQER

SEQ ID NO: 13759 - protein, 12 aa, Homo sapiens
EIHKPGYLANDR

SEQ ID NO: 13760 - protein, 9 aa, Homo sapiens
IALLEEAKK

SEQ ID NO: 13761 - protein, 15 aa, Homo sapiens
NQEQLAAELAEFTAK

SEQ ID NO: 13762 - protein, 10 aa, Homo sapiens
AFAAQEDLEK

SEQ ID NO: 13763 - protein, 10 aa, Homo sapiens
EEEATEWQHK

SEQ ID NO: 13764 - protein, 8 aa, Homo sapiens
QIEEQTIK

SEQ ID NO: 13765 - protein, 13 aa, Homo sapiens
KTQNDVLHAENVK

SEQ ID NO: 13766 - protein, 8 aa, Homo sapiens
IALLEEAK

SEQ ID NO: 13767 - protein, 17 aa, Homo sapiens
FFPEDVSEELIQEITQR

SEQ ID NO: 13768 - protein, 13 aa, Homo sapiens
QLQALSSELAQAR

SEQ ID NO: 13769 - protein, 9 aa, Homo sapiens
DLIQMVLNK

SEQ ID NO: 13770 - protein, 15 aa, Homo sapiens
KNEMAELDIMGLALK

SEQ ID NO: 13771 - protein, 11 aa, Homo sapiens
SEVAKDFEPER

SEQ ID NO: 13772 - protein, 28 aa, Homo sapiens
DTAPVLEGLKEEEITKEEIDILSDACSK

SEQ ID NO: 13773 - protein, 7 aa, Homo sapiens
LLWIDTK

SEQ ID NO: 13774 - protein, 23 aa, Homo sapiens
EKEELELLKEDVQDYSEDLQEIK

SEQ ID NO: 13775 - protein, 19 aa, Homo sapiens
LFPNMLPSTFETQSLKEER

SEQ ID NO: 13776 - protein, 7 aa, Homo sapiens
VKLELAK

SEQ ID NO: 13777 - protein, 8 aa, Homo sapiens
DFSVFFQK

SEQ ID NO: 13778 - protein, 17 aa, Homo sapiens
ADDKLIAEEGVDSLNVK

SEQ ID NO: 13779 - protein, 15 aa, Homo sapiens
LTSLAAALDENKDGK

SEQ ID NO: 13780 - protein, 12 aa, Homo sapiens
STLQTLPEIVAK

SEQ ID NO: 13781 - protein, 12 aa, Homo sapiens
FLQDTIEEMALK

SEQ ID NO: 13782 - protein, 12 aa, Homo sapiens
VAEVEGEQVDNK

SEQ ID NO: 13783 - protein, 16 aa, Homo sapiens
LFPNMLPSTFETQSLK

SEQ ID NO: 13784 - protein, 27 aa, Homo sapiens
VVAAPQRPGTEPQPEMPDTVLQSETLK

SEQ ID NO: 13785 - protein, 13 aa, Homo sapiens
LIAEEGVDSLNVK

SEQ ID NO: 13786 - protein, 18 aa, Homo sapiens
KLEEGGPVYSPPAEVVVK

SEQ ID NO: 13787 - protein, 21 aa, Homo sapiens
LFEDELTLDNLTRPQLVALCK

SEQ ID NO: 13788 - protein, 8 aa, Homo sapiens
VNIDDLVK

SEQ ID NO: 13789 - protein, 15 aa, Homo sapiens
AMYLPDTLSPADQLK

SEQ ID NO: 13790 - protein, 17 aa, Homo sapiens
LEEGGPVYSPPAEVVVK

SEQ ID NO: 13791 - protein, 13 aa, Homo sapiens
ETGERPSNEEIMR

SEQ ID NO: 13792 - protein, 7 aa, Homo sapiens
HYYHGFR

SEQ ID NO: 13793 - protein, 7 aa, Homo sapiens
ICADLFR

SEQ ID NO: 13794 - protein, 16 aa, Homo sapiens
LEATLQEEAAIQQEHR

SEQ ID NO: 13795 - protein, 14 aa, Homo sapiens
LLELQSIGTNNFLR

SEQ ID NO: 13796 - protein, 11 aa, Homo sapiens
KTEEYDTQAMK

SEQ ID NO: 13797 - protein, 11 aa, Homo sapiens
VNEFGESYEEK

SEQ ID NO: 13798 - protein, 16 aa, Homo sapiens
KPTSALDEPVSHWRPR

SEQ ID NO: 13799 - protein, 13 aa, Homo sapiens
STTELPLTVSYDK

SEQ ID NO: 13800 - protein, 14 aa, Homo sapiens
KPTSALDEPVSHWR

SEQ ID NO: 13801 - protein, 8 aa, Homo sapiens
SVAHLPWK

SEQ ID NO: 13802 - protein, 12 aa, Homo sapiens
RVNEFGESYEEK

SEQ ID NO: 13803 - protein, 16 aa, Homo sapiens
GLMPEFQFGTYSESER

SEQ ID NO: 13804 - protein, 23 aa, Homo sapiens
LALNVMADNFVFDGSSLPADVHR

SEQ ID NO: 13805 - protein, 10 aa, Homo sapiens
LQLSVYTTTR

SEQ ID NO: 13806 - protein, 16 aa, Homo sapiens
TVHYLPILFIDQLSNR

SEQ ID NO: 13807 - protein, 11 aa, Homo sapiens
CLEENNGVDKR

SEQ ID NO: 13808 - protein, 29 aa, Homo sapiens
ILAAALTQHNGDAAASLTVAEQYVSAFSK

SEQ ID NO: 13809 - protein, 17 aa, Homo sapiens
AEQINQAAGEASAVLAK

SEQ ID NO: 13810 - protein, 17 aa, Homo sapiens
DVQGTDASLDEELDRVK

SEQ ID NO: 13811 - protein, 30 aa, Homo sapiens
DSNTILLPSNPGDVTSMVAQAMGVYGALTK

SEQ ID NO: 13812 - protein, 10 aa, Homo sapiens
ESAINVAEGK

SEQ ID NO: 13813 - protein, 11 aa, Homo sapiens
QAQILASEAEK

SEQ ID NO: 13814 - protein, 28 aa, Homo sapiens
QAQILASEAEKAEQINQAAGEASAVLAK

SEQ ID NO: 13815 - protein, 16 aa, Homo sapiens
APVPGTPDSLSSGSSR

SEQ ID NO: 13816 - protein, 21 aa, Homo sapiens
ASYGVEDPEYAVTQLAQTTMR

SEQ ID NO: 13817 - protein, 10 aa, Homo sapiens
ATVLESEGTR

SEQ ID NO: 13818 - protein, 7 aa, Homo sapiens
DIHVPPR

SEQ ID NO: 13819 - protein, 15 aa, Homo sapiens
DVQGTDASLDEELDR

SEQ ID NO: 13820 - protein, 21 aa, Homo sapiens
ESLNASIVDAINQAADCWGIR

SEQ ID NO: 13821 - protein, 11 aa, Homo sapiens
ESMQMQVEAER

SEQ ID NO: 13822 - protein, 15 aa, Homo sapiens
ILEPGLNILIPVLDR

SEQ ID NO: 13823 - protein, 17 aa, Homo sapiens
NTVVLFVPQQEAWVVER

SEQ ID NO: 13824 - protein, 11 aa, Homo sapiens
RATVLESEGTR

SEQ ID NO: 13825 - protein, 23 aa, Homo sapiens
YDDQAWARPPKPPTFGEFLSQHK

SEQ ID NO: 13826 - protein, 21 aa, Homo sapiens
EGAASPAPETPQPTSPETSPK

SEQ ID NO: 13827 - protein, 12 aa, Homo sapiens
AELEGVAVTAPR

SEQ ID NO: 13828 - protein, 12 aa, Homo sapiens
DGPVPAHEPSHR

SEQ ID NO: 13829 - protein, 10 aa, Homo sapiens
EGVLEPNPVR

SEQ ID NO: 13830 - protein, 19 aa, Homo sapiens
TTHLAGALSPGEAWPFESV

SEQ ID NO: 13831 - protein, 9 aa, Homo sapiens
LVTLEEFLK

SEQ ID NO: 13832 - protein, 21 aa, Homo sapiens
LHDVNSDGFLDEQELEALFTK

SEQ ID NO: 13833 - protein, 24 aa, Homo sapiens
GEAAPGPAPPAPEATPPPASAAGK

SEQ ID NO: 13834 - protein, 13 aa, Homo sapiens
ASPLVAIGQTLAR

SEQ ID NO: 13835 - protein, 12 aa, Homo sapiens
ATVVVGDLHPLR

SEQ ID NO: 13836 - protein, 14 aa, Homo sapiens
DALPELLGLEAGSR

SEQ ID NO: 13837 - protein, 18 aa, Homo sapiens
EDLIIPHHHSFYDFIVTK

SEQ ID NO: 13838 - protein, 8 aa, Homo sapiens
IAEENIMK

SEQ ID NO: 13839 - protein, 10 aa, Homo sapiens
EELRQEWEAK

SEQ ID NO: 13840 - protein, 11 aa, Homo sapiens
SAGVEQLMYIK

SEQ ID NO: 13841 - protein, 13 aa, Homo sapiens
SSTVGLVTLNDMK

SEQ ID NO: 13842 - protein, 9 aa, Homo sapiens
WEPYDPEKK

SEQ ID NO: 13843 - protein, 13 aa, Homo sapiens
FSAHYDAVEAELK

SEQ ID NO: 13844 - protein, 16 aa, Homo sapiens
LLSDATVEKDESHAGK

SEQ ID NO: 13845 - protein, 10 aa, Homo sapiens
GNTMQQFLQK

SEQ ID NO: 13846 - protein, 11 aa, Homo sapiens
KGNTMQQFLQK

SEQ ID NO: 13847 - protein, 14 aa, Homo sapiens
SGPLFNFDVHDDVR

SEQ ID NO: 13848 - protein, 20 aa, Homo sapiens
KGPNVVGPYGLLQPFADAMK

SEQ ID NO: 13849 - protein, 19 aa, Homo sapiens
GPNVVGPYGLLQPFADAMK

SEQ ID NO: 13850 - protein, 8 aa, Homo sapiens
ILGYMQLR

SEQ ID NO: 13851 - protein, 8 aa, Homo sapiens
FLVGFTNK

SEQ ID NO: 13852 - protein, 11 aa, Homo sapiens
GEDFPANNIVK

SEQ ID NO: 13853 - protein, 26 aa, Homo sapiens
VEMGTSSQNDVDMSWIPQETLNQINK

SEQ ID NO: 13854 - protein, 15 aa, Homo sapiens
GTEDFIVESLDASFR

SEQ ID NO: 13855 - protein, 17 aa, Homo sapiens
QATFEYSFIPAEPMGGR

SEQ ID NO: 13856 - protein, 14 aa, Homo sapiens
LKQEMGGIVTELIR

SEQ ID NO: 13857 - protein, 10 aa, Homo sapiens
GEEDNSLSVR

SEQ ID NO: 13858 - protein, 9 aa, Homo sapiens
LQSEVAELK

SEQ ID NO: 13859 - protein, 9 aa, Homo sapiens
IVADQLCAK

SEQ ID NO: 13860 - protein, 8 aa, Homo sapiens
FGLIQSMK

SEQ ID NO: 13861 - protein, 10 aa, Homo sapiens
TNQIGTVNDR

SEQ ID NO: 13862 - protein, 15 aa, Homo sapiens
VLQLTSWDEDAWASK

SEQ ID NO: 13863 - protein, 21 aa, Homo sapiens
AIPDLTAPVAAVQAAVSNLVR

SEQ ID NO: 13864 - protein, 15 aa, Homo sapiens
DPSASPGDAGEQAIR

SEQ ID NO: 13865 - protein, 22 aa, Homo sapiens
LLAVAATAPPDAPNREEVFDER

SEQ ID NO: 13866 - protein, 19 aa, Homo sapiens
DDNKDIDSEKEAAMEAEIK

SEQ ID NO: 13867 - protein, 7 aa, Homo sapiens
YLLLNPK

SEQ ID NO: 13868 - protein, 25 aa, Homo sapiens
WQFSMSAIKEEQELMEEINEDEPVK

SEQ ID NO: 13869 - protein, 11 aa, Homo sapiens
ESAWTKPDGVK

SEQ ID NO: 13870 - protein, 16 aa, Homo sapiens
EEQELMEEINEDEPVK

SEQ ID NO: 13871 - protein, 13 aa, Homo sapiens
TLESTWEKPQELK

SEQ ID NO: 13872 - protein, 9 aa, Homo sapiens
ATFSEFAAK

SEQ ID NO: 13873 - protein, 23 aa, Homo sapiens
AKPVATAPIPGTPWCVVWTGDER

SEQ ID NO: 13874 - protein, 9 aa, Homo sapiens
IIQEPPHKK

SEQ ID NO: 13875 - protein, 11 aa, Homo sapiens
LFNEHIEALTK

SEQ ID NO: 13876 - protein, 13 aa, Homo sapiens
EEPKEEEMTEEEK

SEQ ID NO: 13877 - protein, 9 aa, Homo sapiens
KQVFDQYVK

SEQ ID NO: 13878 - protein, 8 aa, Homo sapiens
EEAIQNFK

SEQ ID NO: 13879 - protein, 10 aa, Homo sapiens
GVSAFSTWEK

SEQ ID NO: 13880 - protein, 10 aa, Homo sapiens
LIQESDQHLK

SEQ ID NO: 13881 - protein, 8 aa, Homo sapiens
ALLSDMVR

SEQ ID NO: 13882 - protein, 12 aa, Homo sapiens
EALFNEFVAAAR

SEQ ID NO: 13883 - protein, 7 aa, Homo sapiens
FNPGELR

SEQ ID NO: 13884 - protein, 13 aa, Homo sapiens
GPPPPPTASEPTR

SEQ ID NO: 13885 - protein, 12 aa, Homo sapiens
LIVAYVDDLDRR

SEQ ID NO: 13886 - protein, 13 aa, Homo sapiens
LSMWDRPDDLIGR

SEQ ID NO: 13887 - protein, 9 aa, Homo sapiens
QREFEEYIR

SEQ ID NO: 13888 - protein, 17 aa, Homo sapiens
SDFFELLSNHHLDSQSR

SEQ ID NO: 13889 - protein, 10 aa, Homo sapiens
SSDVSWSDTR

SEQ ID NO: 13890 - protein, 9 aa, Homo sapiens
VFFYNPTTR

SEQ ID NO: 13891 - protein, 7 aa, Homo sapiens
VYYYNAR

SEQ ID NO: 13892 - protein, 9 aa, Homo sapiens
WESGSLLER

SEQ ID NO: 13893 - protein, 18 aa, Homo sapiens
MERPQPDSMPQDLSEALK

SEQ ID NO: 13894 - protein, 14 aa, Homo sapiens
AALEQDLAFWYGPR

SEQ ID NO: 13895 - protein, 16 aa, Homo sapiens
ESPVFAPVYFPEELHR

SEQ ID NO: 13896 - protein, 13 aa, Homo sapiens
EVHTQAENAEFMR

SEQ ID NO: 13897 - protein, 11 aa, Homo sapiens
MNSLEMTPAVR

SEQ ID NO: 13898 - protein, 13 aa, Homo sapiens
TEPELLVAHAYTR

SEQ ID NO: 13899 - protein, 11 aa, Homo sapiens
VQDSAPVETPR

SEQ ID NO: 13900 - protein, 13 aa, Homo sapiens
WQEVIPYTPAMQR

SEQ ID NO: 13901 - protein, 14 aa, Homo sapiens
LQETSSQSYVEEQK

SEQ ID NO: 13902 - protein, 12 aa, Homo sapiens
LTMVPPNIAELK

SEQ ID NO: 13903 - protein, 11 aa, Homo sapiens
HMQANPEPPKK

SEQ ID NO: 13904 - protein, 18 aa, Homo sapiens
ALYLSDNDFEILPPDIGK

SEQ ID NO: 13905 - protein, 17 aa, Homo sapiens
LTVLPPELGNLDLTGQK

SEQ ID NO: 13906 - protein, 9 aa, Homo sapiens
DNDLISLPK

SEQ ID NO: 13907 - protein, 12 aa, Homo sapiens
EKNQPEVDMSDR

SEQ ID NO: 13908 - protein, 9 aa, Homo sapiens
EIGELTQLK

SEQ ID NO: 13909 - protein, 8 aa, Homo sapiens
ELHIQGNR

SEQ ID NO: 13910 - protein, 7 aa, Homo sapiens
LQILSLR

SEQ ID NO: 13911 - protein, 11 aa, Homo sapiens
TPYIVLSGSGK

SEQ ID NO: 13912 - protein, 12 aa, Homo sapiens
GLAAALLLCQNK

SEQ ID NO: 13913 - protein, 15 aa, Homo sapiens
LASEYLTPEEMVTFK

SEQ ID NO: 13914 - protein, 16 aa, Homo sapiens
TSSGDASSLSIEETNK

SEQ ID NO: 13915 - protein, 12 aa, Homo sapiens
SLPSAVYCIEDK

SEQ ID NO: 13916 - protein, 17 aa, Homo sapiens
MSSSDTPLGTVALLQEK

SEQ ID NO: 13917 - protein, 19 aa, Homo sapiens
ADDLLPLGDQTQDGDFGSR

SEQ ID NO: 13918 - protein, 15 aa, Homo sapiens
DLQGLTVEHAIDSFR

SEQ ID NO: 13919 - protein, 20 aa, Homo sapiens
EAAGTTAAAGTGGATEQPPR

SEQ ID NO: 13920 - protein, 15 aa, Homo sapiens
EEPVTADVINPMALR

SEQ ID NO: 13921 - protein, 11 aa, Homo sapiens
LEQGGTADGLR

SEQ ID NO: 13922 - protein, 12 aa, Homo sapiens
LQAQSLSTVGPR

SEQ ID NO: 13923 - protein, 21 aa, Homo sapiens
QQQDFSASSTTILDEEPIVNR

SEQ ID NO: 13924 - protein, 18 aa, Homo sapiens
TLGEDDPWLDDTAAWIER

SEQ ID NO: 13925 - protein, 14 aa, Homo sapiens
TLGEIPTYGLAGNR

SEQ ID NO: 13926 - protein, 14 aa, Homo sapiens
YDEELEGERPHSFR

SEQ ID NO: 13927 - protein, 32 aa, Homo sapiens
VGGTKPAGGDFGEVLNSAANASATTTEPLPEK

SEQ ID NO: 13928 - protein, 7 aa, Homo sapiens
GEQGLLR

SEQ ID NO: 13929 - protein, 14 aa, Homo sapiens
IYIGDDNPLTLIVK

SEQ ID NO: 13930 - protein, 19 aa, Homo sapiens
STGLNAVPSQILEGQWAAR

SEQ ID NO: 13931 - protein, 8 aa, Homo sapiens
KSDALTLR

SEQ ID NO: 13932 - protein, 10 aa, Homo sapiens
EAAFSLAEAK

SEQ ID NO: 13933 - protein, 16 aa, Homo sapiens
FTAGDFSTTVIQNVNK

SEQ ID NO: 13934 - protein, 28 aa, Homo sapiens
DNVAGVTLPVFEHYHEGTDSYELTGLAR

SEQ ID NO: 13935 - protein, 9 aa, Homo sapiens
DRIEIFPSR

SEQ ID NO: 13936 - protein, 7 aa, Homo sapiens
IEIFPSR

SEQ ID NO: 13937 - protein, 8 aa, Homo sapiens
MLMGEVMR

SEQ ID NO: 13938 - protein, 12 aa, Homo sapiens
RVNAIEHVIIPR

SEQ ID NO: 13939 - protein, 12 aa, Homo sapiens
TLAYIITELDER

SEQ ID NO: 13940 - protein, 11 aa, Homo sapiens
VNAIEHVIIPR

SEQ ID NO: 13941 - protein, 9 aa, Homo sapiens
APELLLGAK

SEQ ID NO: 13942 - protein, 12 aa, Homo sapiens
IWPGYSELPAVK

SEQ ID NO: 13943 - protein, 15 aa, Homo sapiens
FGALLSDQGFDLMNK

SEQ ID NO: 13944 - protein, 17 aa, Homo sapiens
ETPLPIDPSMFPTWPAK

SEQ ID NO: 13945 - protein, 13 aa, Homo sapiens
TSNLLLSHAGILK

SEQ ID NO: 13946 - protein, 9 aa, Homo sapiens
DSLEEGELR

SEQ ID NO: 13947 - protein, 9 aa, Homo sapiens
EGFPITSLR

SEQ ID NO: 13948 - protein, 7 aa, Homo sapiens
FELGDGR

SEQ ID NO: 13949 - protein, 8 aa, Homo sapiens
FLTYFPGR

SEQ ID NO: 13950 - protein, 10 aa, Homo sapiens
HLHDNWILHR

SEQ ID NO: 13951 - protein, 11 aa, Homo sapiens
IEEGTYGVVYR

SEQ ID NO: 13952 - protein, 10 aa, Homo sapiens
SVEEFQCLNR

SEQ ID NO: 13953 - protein, 8 aa, Homo sapiens
TLMIQLLR

SEQ ID NO: 13954 - protein, 8 aa, Homo sapiens
VGDFGLAR

SEQ ID NO: 13955 - protein, 9 aa, Homo sapiens
YLPALQGCR

SEQ ID NO: 13956 - protein, 15 aa, Homo sapiens
EDSDEVHLEELSLSK

SEQ ID NO: 13957 - protein, 18 aa, Homo sapiens
QLQAQDEEGGGHVPERPK

SEQ ID NO: 13958 - protein, 7 aa, Homo sapiens
KSLWEQK

SEQ ID NO: 13959 - protein, 13 aa, Homo sapiens
WETGEVQAQSAAK

SEQ ID NO: 13960 - protein, 9 aa, Homo sapiens
DIVAGDMSK

SEQ ID NO: 13961 - protein, 32 aa, Homo sapiens
SPEGEQEDRPGLHAYEKEDSDEVHLEELSLSK

SEQ ID NO: 13962 - protein, 15 aa, Homo sapiens
QASIELPSMAVASTK

SEQ ID NO: 13963 - protein, 15 aa, Homo sapiens
SRWETGEVQAQSAAK

SEQ ID NO: 13964 - protein, 17 aa, Homo sapiens
IDQWLEQYTQAIETAGR

SEQ ID NO: 13965 - protein, 7 aa, Homo sapiens
ALANALK

SEQ ID NO: 13966 - protein, 9 aa, Homo sapiens
LWAHGQVGK

SEQ ID NO: 13967 - protein, 14 aa, Homo sapiens
KESPELLELIEDLK

SEQ ID NO: 13968 - protein, 10 aa, Homo sapiens
LYYDTDYGSK

SEQ ID NO: 13969 - protein, 13 aa, Homo sapiens
ESPELLELIEDLK

SEQ ID NO: 13970 - protein, 7 aa, Homo sapiens
LSVVDQK

SEQ ID NO: 13971 - protein, 11 aa, Homo sapiens
PVPQVDEAETR

SEQ ID NO: 13972 - protein, 22 aa, Homo sapiens
QSQQEAEEEEREEEEEAQIIQR

SEQ ID NO: 13973 - protein, 12 aa, Homo sapiens
RVPAHGHPVIER

SEQ ID NO: 13974 - protein, 11 aa, Homo sapiens
VPAHGHPVIER

SEQ ID NO: 13975 - protein, 9 aa, Homo sapiens
YSGELSGIR

SEQ ID NO: 13976 - protein, 10 aa, Homo sapiens
GEVPPKETPK

SEQ ID NO: 13977 - protein, 15 aa, Homo sapiens
GDVTAEEAAGASPAK

SEQ ID NO: 13978 - protein, 13 aa, Homo sapiens
AAATPESQEPQAK

SEQ ID NO: 13979 - protein, 14 aa, Homo sapiens
QLEADIMDINEIFK

SEQ ID NO: 13980 - protein, 14 aa, Homo sapiens
LVAEFTTSLTNFQK

SEQ ID NO: 13981 - protein, 11 aa, Homo sapiens
VSGSFPEDSSK

SEQ ID NO: 13982 - protein, 9 aa, Homo sapiens
QQYTNQLAK

SEQ ID NO: 13983 - protein, 13 aa, Homo sapiens
EFGSLPTTPSEQR

SEQ ID NO: 13984 - protein, 10 aa, Homo sapiens
ITQCSVEIQR

SEQ ID NO: 13985 - protein, 26 aa, Homo sapiens
NLVSWESQTQPQVQVQDEEITEDDLR

SEQ ID NO: 13986 - protein, 16 aa, Homo sapiens
SYTPGVGGDPAQLAQR

SEQ ID NO: 13987 - protein, 15 aa, Homo sapiens
TLNQLGTPQDSPELR

SEQ ID NO: 13988 - protein, 20 aa, Homo sapiens
FGIVTSSAGTGTTEDTEAKK

SEQ ID NO: 13989 - protein, 9 aa, Homo sapiens
FGISSVPTK

SEQ ID NO: 13990 - protein, 10 aa, Homo sapiens
FNVPVSLESK

SEQ ID NO: 13991 - protein, 19 aa, Homo sapiens
FGIVTSSAGTGTTEDTEAK

SEQ ID NO: 13992 - protein, 8 aa, Homo sapiens
TVDVAAEK

SEQ ID NO: 13993 - protein, 14 aa, Homo sapiens
GLSSDNKPMVNLDK

SEQ ID NO: 13994 - protein, 9 aa, Homo sapiens
ATETVELHK

SEQ ID NO: 13995 - protein, 10 aa, Homo sapiens
FGLNVSSISR

SEQ ID NO: 13996 - protein, 10 aa, Homo sapiens
ITSEIPQTER

SEQ ID NO: 13997 - protein, 16 aa, Homo sapiens
DLFGDKEFLPQSAFLK

SEQ ID NO: 13998 - protein, 15 aa, Homo sapiens
TDLDLDGYVSGQEVK

SEQ ID NO: 13999 - protein, 23 aa, Homo sapiens
AAPLIPLSQQIPTGNSLYESYYK

SEQ ID NO: 14000 - protein, 11 aa, Homo sapiens
VGASEAALFLK

SEQ ID NO: 14001 - protein, 32 aa, Homo sapiens
GADPFKGDPFQNDPFAEQQTTSTDPFGGDPFK

SEQ ID NO: 14002 - protein, 18 aa, Homo sapiens
LDPFESSDPFSSSSVSSK

SEQ ID NO: 14003 - protein, 20 aa, Homo sapiens
GTPGPDSSGSLGSGEFTGVK

SEQ ID NO: 14004 - protein, 14 aa, Homo sapiens
ELDDISQEIAQLQR

SEQ ID NO: 14005 - protein, 18 aa, Homo sapiens
GIDPPQVLSPDMVPPSER

SEQ ID NO: 14006 - protein, 8 aa, Homo sapiens
LPLDVLGR

SEQ ID NO: 14007 - protein, 16 aa, Homo sapiens
LQQEETQLEQSIQAGR

SEQ ID NO: 14008 - protein, 8 aa, Homo sapiens
YSLEQDIR

SEQ ID NO: 14009 - protein, 8 aa, Homo sapiens
DKHSQSPR

SEQ ID NO: 14010 - protein, 8 aa, Homo sapiens
VEESGSKK

SEQ ID NO: 14011 - protein, 21 aa, Homo sapiens
LLQAQLQAQKEELQSLMHQPK

SEQ ID NO: 14012 - protein, 13 aa, Homo sapiens
QKEQLEAEAQALR

SEQ ID NO: 14013 - protein, 10 aa, Homo sapiens
EQEPELSFLK

SEQ ID NO: 14014 - protein, 10 aa, Homo sapiens
LLQAQLQAQK

SEQ ID NO: 14015 - protein, 24 aa, Homo sapiens
EQLQAPVPPDSVPSLQNMGLLLDK

SEQ ID NO: 14016 - protein, 10 aa, Homo sapiens
ALQAPHSPSK

SEQ ID NO: 14017 - protein, 9 aa, Homo sapiens
LPWAGQLTK

SEQ ID NO: 14018 - protein, 20 aa, Homo sapiens
EGTKDSHDPLPSWAELLRPK

SEQ ID NO: 14019 - protein, 16 aa, Homo sapiens
DSHDPLPSWAELLRPK

SEQ ID NO: 14020 - protein, 11 aa, Homo sapiens
EELQSLMHQPK

SEQ ID NO: 14021 - protein, 10 aa, Homo sapiens
ALESELQQLR

SEQ ID NO: 14022 - protein, 13 aa, Homo sapiens
APQGCSGVDECAR

SEQ ID NO: 14023 - protein, 12 aa, Homo sapiens
EGHSHSHHHHHR

SEQ ID NO: 14024 - protein, 16 aa, Homo sapiens
ELPLSPAFFGEDGIFR

SEQ ID NO: 14025 - protein, 11 aa, Homo sapiens
EQLEAEAQALR

SEQ ID NO: 14026 - protein, 11 aa, Homo sapiens
GALQQGEAFQR

SEQ ID NO: 14027 - protein, 14 aa, Homo sapiens
GDPAHAGLAELGHR

SEQ ID NO: 14028 - protein, 10 aa, Homo sapiens
GLEEENAQLR

SEQ ID NO: 14029 - protein, 11 aa, Homo sapiens
GPDGVCLSGGR

SEQ ID NO: 14030 - protein, 11 aa, Homo sapiens
LLGSVQQDLER

SEQ ID NO: 14031 - protein, 10 aa, Homo sapiens
LQGLEADCVR

SEQ ID NO: 14032 - protein, 13 aa, Homo sapiens
NWGGQEDREPAGR

SEQ ID NO: 14033 - protein, 15 aa, Homo sapiens
QEGLTFFGTELAPVR

SEQ ID NO: 14034 - protein, 9 aa, Homo sapiens
QQELASLLR

SEQ ID NO: 14035 - protein, 15 aa, Homo sapiens
QVLPDPEVLEAVGDR

SEQ ID NO: 14036 - protein, 12 aa, Homo sapiens
RLLGSVQQDLER

SEQ ID NO: 14037 - protein, 15 aa, Homo sapiens
YRAPQGCSGVDECAR

SEQ ID NO: 14038 - protein, 28 aa, Homo sapiens
GLSASYLEPDRYDEEEEGEESISLAAIK

SEQ ID NO: 14039 - protein, 13 aa, Homo sapiens
VNTDLGNDLYFVK

SEQ ID NO: 14040 - protein, 13 aa, Homo sapiens
APLQGDHNHLFIR

SEQ ID NO: 14041 - protein, 10 aa, Homo sapiens
LPNFLSVEPR

SEQ ID NO: 14042 - protein, 14 aa, Homo sapiens
LTFRPHSTDSATHR

SEQ ID NO: 14043 - protein, 19 aa, Homo sapiens
LLGPDAAINLTDPDGALAK

SEQ ID NO: 14044 - protein, 10 aa, Homo sapiens
QQLVASHLEK

SEQ ID NO: 14045 - protein, 29 aa, Homo sapiens
TTGTPPDSSLVTYELHSRPEQDKFSQAAK

SEQ ID NO: 14046 - protein, 11 aa, Homo sapiens
ASVEDADTQSK

SEQ ID NO: 14047 - protein, 18 aa, Homo sapiens
TGYESGEYEMLGEGLGVK

SEQ ID NO: 14048 - protein, 14 aa, Homo sapiens
LLHEVQELTTEVEK

SEQ ID NO: 14049 - protein, 14 aa, Homo sapiens
DNTTLLTQVQTTMR

SEQ ID NO: 14050 - protein, 16 aa, Homo sapiens
ENLATVEGNFASIDER

SEQ ID NO: 14051 - protein, 7 aa, Homo sapiens
GLDFSDR

SEQ ID NO: 14052 - protein, 9 aa, Homo sapiens
LTELETAVR

SEQ ID NO: 14053 - protein, 10 aa, Homo sapiens
RLTELETAVR

SEQ ID NO: 14054 - protein, 10 aa, Homo sapiens
VHQLYETIQR

SEQ ID NO: 14055 - protein, 14 aa, Homo sapiens
WSPIASTLPELVQR

SEQ ID NO: 14056 - protein, 9 aa, Homo sapiens
YADLPGIAR

SEQ ID NO: 14057 - protein, 11 aa, Homo sapiens
SKWDEEWDKNK

SEQ ID NO: 14058 - protein, 14 aa, Homo sapiens
ATNVVMNYSEIESK

SEQ ID NO: 14059 - protein, 13 aa, Homo sapiens
GEFKDEEETVTTK

SEQ ID NO: 14060 - protein, 17 aa, Homo sapiens
ASPDQNASTHTPQSSVK

SEQ ID NO: 14061 - protein, 27 aa, Homo sapiens
SQPLQNVSTVLQKPNPLYNQNTDMVQK

SEQ ID NO: 14062 - protein, 11 aa, Homo sapiens
IGSTIDDTISK

SEQ ID NO: 14063 - protein, 20 aa, Homo sapiens
SLENYHFVDEHGKDQGINIR

SEQ ID NO: 14064 - protein, 13 aa, Homo sapiens
SLENYHFVDEHGK

SEQ ID NO: 14065 - protein, 20 aa, Homo sapiens
EATNDDPWGPSGQLMGEIAK

SEQ ID NO: 14066 - protein, 15 aa, Homo sapiens
DKYVGVSSDSVGGFR

SEQ ID NO: 14067 - protein, 12 aa, Homo sapiens
QDAFANFANFSK

SEQ ID NO: 14068 - protein, 14 aa, Homo sapiens
TIDLGAAAHYTGDK

SEQ ID NO: 14069 - protein, 7 aa, Homo sapiens
DQGINIR

SEQ ID NO: 14070 - protein, 7 aa, Homo sapiens
EHIYDLR

SEQ ID NO: 14071 - protein, 13 aa, Homo sapiens
ELVEFAQDDDRLR

SEQ ID NO: 14072 - protein, 14 aa, Homo sapiens
HIHITQATETTTTR

SEQ ID NO: 14073 - protein, 13 aa, Homo sapiens
YVGVSSDSVGGFR

SEQ ID NO: 14074 - protein, 7 aa, Homo sapiens
NECNQCK

SEQ ID NO: 14075 - protein, 24 aa, Homo sapiens
APKPDGPGGGPGGSHMGGNYGDDR

SEQ ID NO: 14076 - protein, 8 aa, Homo sapiens
EFSGNPIK

SEQ ID NO: 14077 - protein, 9 aa, Homo sapiens
AAIDWFDGK

SEQ ID NO: 14078 - protein, 16 aa, Homo sapiens
LKGEATVSFDDPPSAK

SEQ ID NO: 14079 - protein, 17 aa, Homo sapiens
AAIDWFDGKEFSGNPIK

SEQ ID NO: 14080 - protein, 32 aa, Homo sapiens
HDSEQDNSDNNTIFVQGLGENVTIESVADYFK

SEQ ID NO: 14081 - protein, 14 aa, Homo sapiens
GEATVSFDDPPSAK

SEQ ID NO: 14082 - protein, 14 aa, Homo sapiens
CPNPTCENMNFSWR

SEQ ID NO: 14083 - protein, 12 aa, Homo sapiens
TGQPMINLYTDR

SEQ ID NO: 14084 - protein, 14 aa, Homo sapiens
STDQTVLEELASIK

SEQ ID NO: 14085 - protein, 10 aa, Homo sapiens
ELQAMSEQLR

SEQ ID NO: 14086 - protein, 18 aa, Homo sapiens
MGEAIETTQQLYPSLLER

SEQ ID NO: 14087 - protein, 16 aa, Homo sapiens
SGIGSCAFATVEDYLH

SEQ ID NO: 14088 - protein, 10 aa, Homo sapiens
SQDSYPVSPR

SEQ ID NO: 14089 - protein, 18 aa, Homo sapiens
AIENIDTLTNLESLFLGK

SEQ ID NO: 14090 - protein, 15 aa, Homo sapiens
HSSGIVADLSEQSLK

SEQ ID NO: 14091 - protein, 11 aa, Homo sapiens
DAEDVDLNHYR

SEQ ID NO: 14092 - protein, 15 aa, Homo sapiens
GAGQQQSQEMMEVDR

SEQ ID NO: 14093 - protein, 11 aa, Homo sapiens
IEGLQNLVNLR

SEQ ID NO: 14094 - protein, 19 aa, Homo sapiens
IENLSNLHQLQMLELGSNR

SEQ ID NO: 14095 - protein, 19 aa, Homo sapiens
LQNLDALTNLTVLSMQSNR

SEQ ID NO: 14096 - protein, 10 aa, Homo sapiens
LTMLDIASNR

SEQ ID NO: 14097 - protein, 9 aa, Homo sapiens
SLETVYLER

SEQ ID NO: 14098 - protein, 8 aa, Homo sapiens
SDIPEKPK

SEQ ID NO: 14099 - protein, 25 aa, Homo sapiens
FDGRPTKPPPNSYSLYCAELMANMK

SEQ ID NO: 14100 - protein, 8 aa, Homo sapiens
DFSGDMCK

SEQ ID NO: 14101 - protein, 10 aa, Homo sapiens
TTESHMDWEK

SEQ ID NO: 14102 - protein, 13 aa, Homo sapiens
FREDHPDLIQNAK

SEQ ID NO: 14103 - protein, 11 aa, Homo sapiens
AMEMTWNNMEK

SEQ ID NO: 14104 - protein, 12 aa, Homo sapiens
LHPEMSNLDLTK

SEQ ID NO: 14105 - protein, 14 aa, Homo sapiens
WSQEDMLTLLECMK

SEQ ID NO: 14106 - protein, 10 aa, Homo sapiens
KKDYEVELLR

SEQ ID NO: 14107 - protein, 9 aa, Homo sapiens
MVLCSQQWK

SEQ ID NO: 14108 - protein, 13 aa, Homo sapiens
RPVSAMFIFSEEK

SEQ ID NO: 14109 - protein, 13 aa, Homo sapiens
HPELNISEEGITK

SEQ ID NO: 14110 - protein, 14 aa, Homo sapiens
TLTELILDAQEHVK

SEQ ID NO: 14111 - protein, 11 aa, Homo sapiens
TPQQLWYTHEK

SEQ ID NO: 14112 - protein, 8 aa, Homo sapiens
KPLTPYFR

SEQ ID NO: 14113 - protein, 16 aa, Homo sapiens
AEEIWQQSVIGDYLAR

SEQ ID NO: 14114 - protein, 8 aa, Homo sapiens
DYEVELLR

SEQ ID NO: 14115 - protein, 12 aa, Homo sapiens
FLESLPEEEQQR

SEQ ID NO: 14116 - protein, 7 aa, Homo sapiens
MVEIGSR

SEQ ID NO: 14117 - protein, 16 aa, Homo sapiens
QLQEERPELSESELTR

SEQ ID NO: 14118 - protein, 17 aa, Homo sapiens
RAEEIWQQSVIGDYLAR

SEQ ID NO: 14119 - protein, 9 aa, Homo sapiens
WVEISNEVR

SEQ ID NO: 14120 - protein, 7 aa, Homo sapiens
YIQDFQR

SEQ ID NO: 14121 - protein, 18 aa, Homo sapiens
DPGGITAGSTDEPPMLTK

SEQ ID NO: 14122 - protein, 8 aa, Homo sapiens
TLQQQTFK

SEQ ID NO: 14123 - protein, 11 aa, Homo sapiens
GKDAFPVAGQK

SEQ ID NO: 14124 - protein, 11 aa, Homo sapiens
NFVVVMVTKPK

SEQ ID NO: 14125 - protein, 10 aa, Homo sapiens
IDIDPEETVK

SEQ ID NO: 14126 - protein, 29 aa, Homo sapiens
QEKPAEKPAETPVATSPTATDSTSGDSSR

SEQ ID NO: 14127 - protein, 9 aa, Homo sapiens
ILNDDTALK

SEQ ID NO: 14128 - protein, 9 aa, Homo sapiens
DAFPVAGQK

SEQ ID NO: 14129 - protein, 8 aa, Homo sapiens
ASFNNPDR

SEQ ID NO: 14130 - protein, 13 aa, Homo sapiens
AVEYLLMGIPGDR

SEQ ID NO: 14131 - protein, 8 aa, Homo sapiens
EQVIAALR

SEQ ID NO: 14132 - protein, 17 aa, Homo sapiens
NENLAANFLLQQNFDED

SEQ ID NO: 14133 - protein, 9 aa, Homo sapiens
NQPQFQQMR

SEQ ID NO: 14134 - protein, 19 aa, Homo sapiens
QIIQQNPSLLPALLQQIGR

SEQ ID NO: 14135 - protein, 11 aa, Homo sapiens
GVTYLFPIQVK

SEQ ID NO: 14136 - protein, 12 aa, Homo sapiens
SSDNKLEETLTR

SEQ ID NO: 14137 - protein, 22 aa, Homo sapiens
GAVDALAAALAHISGASSFEPR

SEQ ID NO: 14138 - protein, 16 aa, Homo sapiens
GNMGVCFDVPTTESER

SEQ ID NO: 14139 - protein, 17 aa, Homo sapiens
LPEIEEYYDGNTSSNSR

SEQ ID NO: 14140 - protein, 17 aa, Homo sapiens
PAVIGDVLQVYSGSEGR

SEQ ID NO: 14141 - protein, 14 aa, Homo sapiens
SLASVSYAAVDFFR

SEQ ID NO: 14142 - protein, 11 aa, Homo sapiens
TFSFAIPLIER

SEQ ID NO: 14143 - protein, 10 aa, Homo sapiens
VLVATNVAAR

SEQ ID NO: 14144 - protein, 8 aa, Homo sapiens
VLVLAPTR

SEQ ID NO: 14145 - protein, 12 aa, Homo sapiens
KLNKEELPVIPK

SEQ ID NO: 14146 - protein, 11 aa, Homo sapiens
FSQMLQDKPLR

SEQ ID NO: 14147 - protein, 22 aa, Homo sapiens
GQHEPSKPPPAGETVTGGFGAK

SEQ ID NO: 14148 - protein, 8 aa, Homo sapiens
DTLALLQK

SEQ ID NO: 14149 - protein, 11 aa, Homo sapiens
QQDLHLESPQR

SEQ ID NO: 14150 - protein, 15 aa, Homo sapiens
LSMVMYLTQFYEMFK

SEQ ID NO: 14151 - protein, 11 aa, Homo sapiens
DSLVALLEEQR

SEQ ID NO: 14152 - protein, 13 aa, Homo sapiens
ENVDQEALLSYAR

SEQ ID NO: 14153 - protein, 15 aa, Homo sapiens
SWSLGTSPLEVLAER

SEQ ID NO: 14154 - protein, 23 aa, Homo sapiens
EKDSPHMQDPNQADEEAMTQIIR

SEQ ID NO: 14155 - protein, 19 aa, Homo sapiens
IPLPGAEMLEEEPLYVNAK

SEQ ID NO: 14156 - protein, 12 aa, Homo sapiens
VNLEVIKPWITK

SEQ ID NO: 14157 - protein, 17 aa, Homo sapiens
VKEPSVQEATSTSDILK

SEQ ID NO: 14158 - protein, 10 aa, Homo sapiens
MAAADSVQQR

SEQ ID NO: 14159 - protein, 21 aa, Homo sapiens
ALDDKPPPPPPPVGNRPSIHR

SEQ ID NO: 14160 - protein, 11 aa, Homo sapiens
ALPATPQLPSR

SEQ ID NO: 14161 - protein, 10 aa, Homo sapiens
GAPPLPPIPR

SEQ ID NO: 14162 - protein, 16 aa, Homo sapiens
NLSLSSSTPPLPSPGR

SEQ ID NO: 14163 - protein, 12 aa, Homo sapiens
SGPLPPPPPVSR

SEQ ID NO: 14164 - protein, 22 aa, Homo sapiens
SGPLPPPPSERPPPPVRDPPGR

SEQ ID NO: 14165 - protein, 8 aa, Homo sapiens
SGPPEPQR

SEQ ID NO: 14166 - protein, 27 aa, Homo sapiens
SGPRPPLPPDRPSAGAPPPPPPSTSIR

SEQ ID NO: 14167 - protein, 25 aa, Homo sapiens
VLRPPGGGSNFSLGFDEPTEQPVRK

SEQ ID NO: 14168 - protein, 18 aa, Homo sapiens
MASNIFGTPEENQASWAK

SEQ ID NO: 14169 - protein, 15 aa, Homo sapiens
SSGGREDLESSGLQR

SEQ ID NO: 14170 - protein, 24 aa, Homo sapiens
VLRPPGGGSNFSLGFDEPTEQPVR

SEQ ID NO: 14171 - protein, 14 aa, Homo sapiens
KVESLQEEIAFLKK

SEQ ID NO: 14172 - protein, 10 aa, Homo sapiens
NLQEAEEWYK

SEQ ID NO: 14173 - protein, 13 aa, Homo sapiens
VESLQEEIAFLKK

SEQ ID NO: 14174 - protein, 14 aa, Homo sapiens
ILLAELEQLKGQGK

SEQ ID NO: 14175 - protein, 19 aa, Homo sapiens
LLQDSVDFSLADAINTEFK

SEQ ID NO: 14176 - protein, 10 aa, Homo sapiens
EKLQEEMLQR

SEQ ID NO: 14177 - protein, 9 aa, Homo sapiens
QQYESVAAK

SEQ ID NO: 14178 - protein, 9 aa, Homo sapiens
EYQDLLNVK

SEQ ID NO: 14179 - protein, 13 aa, Homo sapiens
TNEKVELQELNDR

SEQ ID NO: 14180 - protein, 10 aa, Homo sapiens
RQVDQLTNDK

SEQ ID NO: 14181 - protein, 15 aa, Homo sapiens
ETNLDSLPLVDTHSK

SEQ ID NO: 14182 - protein, 14 aa, Homo sapiens
LQDEIQNMKEEMAR

SEQ ID NO: 14183 - protein, 21 aa, Homo sapiens
QVQSLTCEVDALKGTNESLER

SEQ ID NO: 14184 - protein, 16 aa, Homo sapiens
ETNLDSLPLVDTHSKR

SEQ ID NO: 14185 - protein, 9 aa, Homo sapiens
KLLEGEESR

SEQ ID NO: 14186 - protein, 9 aa, Homo sapiens
LQDEIQNMK

SEQ ID NO: 14187 - protein, 13 aa, Homo sapiens
QVQSLTCEVDALK

SEQ ID NO: 14188 - protein, 7 aa, Homo sapiens
FANYIDK

SEQ ID NO: 14189 - protein, 21 aa, Homo sapiens
EKLQEEMLQREEAENTLQSFR

SEQ ID NO: 14190 - protein, 9 aa, Homo sapiens
QVDQLTNDK

SEQ ID NO: 14191 - protein, 14 aa, Homo sapiens
RQVQSLTCEVDALK

SEQ ID NO: 14192 - protein, 13 aa, Homo sapiens
KVESLQEEIAFLK

SEQ ID NO: 14193 - protein, 10 aa, Homo sapiens
ILLAELEQLK

SEQ ID NO: 14194 - protein, 12 aa, Homo sapiens
VESLQEEIAFLK

SEQ ID NO: 14195 - protein, 7 aa, Homo sapiens
FLEQQNK

SEQ ID NO: 14196 - protein, 16 aa, Homo sapiens
DGQVINETSQHHDDLE

SEQ ID NO: 14197 - protein, 9 aa, Homo sapiens
DNLAEDIMR

SEQ ID NO: 14198 - protein, 11 aa, Homo sapiens
EEAENTLQSFR

SEQ ID NO: 14199 - protein, 19 aa, Homo sapiens
EMEENFAVEAANYQDTIGR

SEQ ID NO: 14200 - protein, 10 aa, Homo sapiens
FADLSEAANR

SEQ ID NO: 14201 - protein, 8 aa, Homo sapiens
GTNESLER

SEQ ID NO: 14202 - protein, 14 aa, Homo sapiens
ISLPLPNFSSLNLR

SEQ ID NO: 14203 - protein, 10 aa, Homo sapiens
LGDLYEEEMR

SEQ ID NO: 14204 - protein, 8 aa, Homo sapiens
LLEGEESR

SEQ ID NO: 14205 - protein, 8 aa, Homo sapiens
LQEEMLQR

SEQ ID NO: 14206 - protein, 19 aa, Homo sapiens
LQEEMLQREEAENTLQSFR

SEQ ID NO: 14207 - protein, 11 aa, Homo sapiens
MALDIEIATYR

SEQ ID NO: 14208 - protein, 10 aa, Homo sapiens
MFGGPGTASR

SEQ ID NO: 14209 - protein, 15 aa, Homo sapiens
MFGGPGTASRPSSSR

SEQ ID NO: 14210 - protein, 10 aa, Homo sapiens
QDVDNASLAR

SEQ ID NO: 14211 - protein, 7 aa, Homo sapiens
QESTEYR

SEQ ID NO: 14212 - protein, 11 aa, Homo sapiens
RMFGGPGTASR

SEQ ID NO: 14213 - protein, 14 aa, Homo sapiens
SLYASSPGGVYATR

SEQ ID NO: 14214 - protein, 12 aa, Homo sapiens
SRLGDLYEEEMR

SEQ ID NO: 14215 - protein, 7 aa, Homo sapiens
SSVPGVR

SEQ ID NO: 14216 - protein, 8 aa, Homo sapiens
SYVTTSTR

SEQ ID NO: 14217 - protein, 21 aa, Homo sapiens
TVETRDGQVINETSQHHDDLE

SEQ ID NO: 14218 - protein, 9 aa, Homo sapiens
TYSLGSALR

SEQ ID NO: 14219 - protein, 14 aa, Homo sapiens
TYSLGSALRPSTSR

SEQ ID NO: 14220 - protein, 9 aa, Homo sapiens
VELQELNDR

SEQ ID NO: 14221 - protein, 14 aa, Homo sapiens
VEVERDNLAEDIMR

SEQ ID NO: 14222 - protein, 22 aa, Homo sapiens
SPWNFLGDELYEQSDEEQDSVK

SEQ ID NO: 14223 - protein, 10 aa, Homo sapiens
WQLYAAQSTK

SEQ ID NO: 14224 - protein, 16 aa, Homo sapiens
NLLTGETEADPEMIKR

SEQ ID NO: 14225 - protein, 15 aa, Homo sapiens
NLLTGETEADPEMIK

SEQ ID NO: 14226 - protein, 10 aa, Homo sapiens
AAAQEADGAR

SEQ ID NO: 14227 - protein, 15 aa, Homo sapiens
GPAPQDQAGPGGAPR

SEQ ID NO: 14228 - protein, 8 aa, Homo sapiens
LATVHMSR

SEQ ID NO: 14229 - protein, 9 aa, Homo sapiens
QSLEGLSVR

SEQ ID NO: 14230 - protein, 16 aa, Homo sapiens
RGPAPQDQAGPGGAPR

SEQ ID NO: 14231 - protein, 8 aa, Homo sapiens
SVAHLPWR

SEQ ID NO: 14232 - protein, 7 aa, Homo sapiens
VAGIFPR

SEQ ID NO: 14233 - protein, 10 aa, Homo sapiens
VSFCPLSLWR

SEQ ID NO: 14234 - protein, 8 aa, Homo sapiens
VYDDMAFR

SEQ ID NO: 14235 - protein, 14 aa, Homo sapiens
AEALSEPLTKPVGK

SEQ ID NO: 14236 - protein, 11 aa, Homo sapiens
NNPIYQFHIEK

SEQ ID NO: 14237 - protein, 12 aa, Homo sapiens
DAYSLANNPQYK

SEQ ID NO: 14238 - protein, 9 aa, Homo sapiens
TGPLLIELR

SEQ ID NO: 14239 - protein, 26 aa, Homo sapiens
VMGGYDFPGSNSNIDLHALTGWIPER

SEQ ID NO: 14240 - protein, 15 aa, Homo sapiens
VYYPADPPPYIDGIR

SEQ ID NO: 14241 - protein, 13 aa, Homo sapiens
HLVYESDKNKDEK

SEQ ID NO: 14242 - protein, 27 aa, Homo sapiens
LTKEEILENWNMFVGSQATNYGEDLTK

SEQ ID NO: 14243 - protein, 8 aa, Homo sapiens
YIFDNVAK

SEQ ID NO: 14244 - protein, 19 aa, Homo sapiens
IVDRIDNDGDGFVTTEELK

SEQ ID NO: 14245 - protein, 25 aa, Homo sapiens
QATYGYYLGNPAEFHDSSDHHTFKK

SEQ ID NO: 14246 - protein, 13 aa, Homo sapiens
TFDQLTPDESKER

SEQ ID NO: 14247 - protein, 15 aa, Homo sapiens
IDNDGDGFVTTEELK

SEQ ID NO: 14248 - protein, 16 aa, Homo sapiens
EEFTAFLHPEEFEHMK

SEQ ID NO: 14249 - protein, 12 aa, Homo sapiens
AADLNGDLTATR

SEQ ID NO: 14250 - protein, 7 aa, Homo sapiens
EQFNEFR

SEQ ID NO: 14251 - protein, 16 aa, Homo sapiens
HWILPQDYDHAQAEAR

SEQ ID NO: 14252 - protein, 19 aa, Homo sapiens
IDGDKDGFVTVDELKDWIK

SEQ ID NO: 14253 - protein, 29 aa, Homo sapiens
NADGFIDLEEYIGDMYSHDGNTDEPEWVK

SEQ ID NO: 14254 - protein, 16 aa, Homo sapiens
GHDLNEDGLVSWEEYK

SEQ ID NO: 14255 - protein, 13 aa, Homo sapiens
TFDQLTPEESKER

SEQ ID NO: 14256 - protein, 11 aa, Homo sapiens
TFDQLTPEESK

SEQ ID NO: 14257 - protein, 13 aa, Homo sapiens
DIVVQETMEDIDK

SEQ ID NO: 14258 - protein, 22 aa, Homo sapiens
VHNDAQSFDYDHDAFLGAEEAK

SEQ ID NO: 14259 - protein, 10 aa, Homo sapiens
VHHEPQLSDK

SEQ ID NO: 14260 - protein, 12 aa, Homo sapiens
MADKDGDLIATK

SEQ ID NO: 14261 - protein, 13 aa, Homo sapiens
HLVYESDQNKDGK

SEQ ID NO: 14262 - protein, 23 aa, Homo sapiens
MDKEETKDWILPSDYDHAEAEAR

SEQ ID NO: 14263 - protein, 16 aa, Homo sapiens
EEFTAFLHPEEYDYMK

SEQ ID NO: 14264 - protein, 10 aa, Homo sapiens
HLVYESDQNK

SEQ ID NO: 14265 - protein, 16 aa, Homo sapiens
DWILPSDYDHAEAEAR

SEQ ID NO: 14266 - protein, 7 aa, Homo sapiens
EQFVEFR

SEQ ID NO: 14267 - protein, 8 aa, Homo sapiens
WIYEDVER

SEQ ID NO: 14268 - protein, 12 aa, Homo sapiens
EKKPGDLSDELR

SEQ ID NO: 14269 - protein, 21 aa, Homo sapiens
KIEEAMDGSETPQLFTVLPEK

SEQ ID NO: 14270 - protein, 22 aa, Homo sapiens
KIEEAMDGSETPQLFTVLPEKR

SEQ ID NO: 14271 - protein, 17 aa, Homo sapiens
QQGDHSLKEHELLEQQK

SEQ ID NO: 14272 - protein, 21 aa, Homo sapiens
EQQAQVEKEDFSDMVAEHAAK

SEQ ID NO: 14273 - protein, 29 aa, Homo sapiens
KGPAPELQGVEVALAPEELELDPMAMTQK

SEQ ID NO: 14274 - protein, 20 aa, Homo sapiens
QLVARPDVVEMHDVTAQDPK

SEQ ID NO: 14275 - protein, 13 aa, Homo sapiens
ISLGMPVGPNAHK

SEQ ID NO: 14276 - protein, 7 aa, Homo sapiens
LHDAFFK

SEQ ID NO: 14277 - protein, 19 aa, Homo sapiens
SSLGQSASETEEDTVSVSK

SEQ ID NO: 14278 - protein, 10 aa, Homo sapiens
EMDDPSVGPK

SEQ ID NO: 14279 - protein, 21 aa, Homo sapiens
GPPPPPGDENREMDDPSVGPK

SEQ ID NO: 14280 - protein, 7 aa, Homo sapiens
IPQALEK

SEQ ID NO: 14281 - protein, 14 aa, Homo sapiens
GIEKPPFELPDFIK

SEQ ID NO: 14282 - protein, 11 aa, Homo sapiens
YGPPPSYPNLK

SEQ ID NO: 14283 - protein, 25 aa, Homo sapiens
AELQLPPPPPPGHYGAWAAQELQAK

SEQ ID NO: 14284 - protein, 20 aa, Homo sapiens
IEEAMDGSETPQLFTVLPEK

SEQ ID NO: 14285 - protein, 7 aa, Homo sapiens
IDIDYQK

SEQ ID NO: 14286 - protein, 7 aa, Homo sapiens
FTVAELK

SEQ ID NO: 14287 - protein, 21 aa, Homo sapiens
IEEAMDGSETPQLFTVLPEKR

SEQ ID NO: 14288 - protein, 9 aa, Homo sapiens
EHELLEQQK

SEQ ID NO: 14289 - protein, 10 aa, Homo sapiens
KPGDLSDELR

SEQ ID NO: 14290 - protein, 9 aa, Homo sapiens
ATEHPEPPK

SEQ ID NO: 14291 - protein, 9 aa, Homo sapiens
AAVLLEQER

SEQ ID NO: 14292 - protein, 11 aa, Homo sapiens
GPPPPPGDENR

SEQ ID NO: 14293 - protein, 12 aa, Homo sapiens
LAEIGAPIQGNR

SEQ ID NO: 14294 - protein, 18 aa, Homo sapiens
LAEIGAPIQGNREELVER

SEQ ID NO: 14295 - protein, 15 aa, Homo sapiens
LAQQQAALLMQQEER

SEQ ID NO: 14296 - protein, 18 aa, Homo sapiens
MGTPVPRPPQDMGQIGVR

SEQ ID NO: 14297 - protein, 18 aa, Homo sapiens
QEEMNSQQEEEEMETDAR

SEQ ID NO: 14298 - protein, 12 aa, Homo sapiens
QTGIVLNRPVLR

SEQ ID NO: 14299 - protein, 23 aa, Homo sapiens
TATVGGAMMGSTHIYDMSTVMSR

SEQ ID NO: 14300 - protein, 8 aa, Homo sapiens
TEEEEIDR

SEQ ID NO: 14301 - protein, 7 aa, Homo sapiens
TGIQEMR

SEQ ID NO: 14302 - protein, 23 aa, Homo sapiens
VAAPVGPVGPTPTVLPMGAPVPR

SEQ ID NO: 14303 - protein, 12 aa, Homo sapiens
VGEPVALSEEER

SEQ ID NO: 14304 - protein, 11 aa, Homo sapiens
VPPPWLIAMQR

SEQ ID NO: 14305 - protein, 14 aa, Homo sapiens
MGLEVIPVTSTTNK

SEQ ID NO: 14306 - protein, 19 aa, Homo sapiens
TGAPQYGSYGTAPVNLNIK

SEQ ID NO: 14307 - protein, 27 aa, Homo sapiens
AFPYGNVAFPHLPGSAPSWPSLVDTSK

SEQ ID NO: 14308 - protein, 11 aa, Homo sapiens
AEFTSPPSLFK

SEQ ID NO: 14309 - protein, 17 aa, Homo sapiens
RLPGAIDVIGQTITISR

SEQ ID NO: 14310 - protein, 20 aa, Homo sapiens
AAATGAVAASAASGQAEGKK

SEQ ID NO: 14311 - protein, 10 aa, Homo sapiens
GSGSGFKPFK

SEQ ID NO: 14312 - protein, 12 aa, Homo sapiens
NIWVSGLSSNTK

SEQ ID NO: 14313 - protein, 10 aa, Homo sapiens
ELLSAEENKR

SEQ ID NO: 14314 - protein, 19 aa, Homo sapiens
AAATGAVAASAASGQAEGK

SEQ ID NO: 14315 - protein, 12 aa, Homo sapiens
TELHGQLISVEK

SEQ ID NO: 14316 - protein, 13 aa, Homo sapiens
EAGPNPSRPTSWK

SEQ ID NO: 14317 - protein, 18 aa, Homo sapiens
AGAGMITQHSSNASPINR

SEQ ID NO: 14318 - protein, 11 aa, Homo sapiens
GGGSQHYPEER

SEQ ID NO: 14319 - protein, 8 aa, Homo sapiens
LSLDTDAR

SEQ ID NO: 14320 - protein, 8 aa, Homo sapiens
REDPSFER

SEQ ID NO: 14321 - protein, 14 aa, Homo sapiens
TVIIHDRPDITHPR

SEQ ID NO: 14322 - protein, 27 aa, Homo sapiens
NLLEISGPETVPLPNVPSIALPSKPAK

SEQ ID NO: 14323 - protein, 10 aa, Homo sapiens
LRDTEEMLSK

SEQ ID NO: 14324 - protein, 18 aa, Homo sapiens
KEEEDDDMKELENWAGSM

SEQ ID NO: 14325 - protein, 14 aa, Homo sapiens
EALENANTNTEVLK

SEQ ID NO: 14326 - protein, 7 aa, Homo sapiens
AALQALK

SEQ ID NO: 14327 - protein, 8 aa, Homo sapiens
LFGAGGGK

SEQ ID NO: 14328 - protein, 7 aa, Homo sapiens
KQEFLEK

SEQ ID NO: 14329 - protein, 9 aa, Homo sapiens
IEQELTAAK

SEQ ID NO: 14330 - protein, 10 aa, Homo sapiens
KIEQELTAAK

SEQ ID NO: 14331 - protein, 11 aa, Homo sapiens
GGPTPQEAIQR

SEQ ID NO: 14332 - protein, 16 aa, Homo sapiens
QLAQIDGTLSTIEFQR

SEQ ID NO: 14333 - protein, 12 aa, Homo sapiens
IGDGMNAYVAYK

SEQ ID NO: 14334 - protein, 15 aa, Homo sapiens
QVGDIFSNPETVLAK

SEQ ID NO: 14335 - protein, 12 aa, Homo sapiens
SMGLPTSDEQKK

SEQ ID NO: 14336 - protein, 15 aa, Homo sapiens
LKPNLGNGADLPNYR

SEQ ID NO: 14337 - protein, 12 aa, Homo sapiens
FMDQHPEMDFSK

SEQ ID NO: 14338 - protein, 14 aa, Homo sapiens
TDFFIGGEEGMAEK

SEQ ID NO: 14339 - protein, 8 aa, Homo sapiens
LQLEIDQK

SEQ ID NO: 14340 - protein, 11 aa, Homo sapiens
LVSSDPEINTK

SEQ ID NO: 14341 - protein, 12 aa, Homo sapiens
VEESSWLIEDGK

SEQ ID NO: 14342 - protein, 8 aa, Homo sapiens
VVTVHLEK

SEQ ID NO: 14343 - protein, 15 aa, Homo sapiens
GQPAIIDGELYNEVK

SEQ ID NO: 14344 - protein, 15 aa, Homo sapiens
LITQTFSHHNQLAQK

SEQ ID NO: 14345 - protein, 11 aa, Homo sapiens
SMGLPTSDEQK

SEQ ID NO: 14346 - protein, 9 aa, Homo sapiens
SETSGPQIK

SEQ ID NO: 14347 - protein, 13 aa, Homo sapiens
KFMDQHPEMDFSK

SEQ ID NO: 14348 - protein, 10 aa, Homo sapiens
DAENHEAQLK

SEQ ID NO: 14349 - protein, 8 aa, Homo sapiens
DMVVDIQR

SEQ ID NO: 14350 - protein, 9 aa, Homo sapiens
ELTDEEAER

SEQ ID NO: 14351 - protein, 9 aa, Homo sapiens
LSDLDSETR

SEQ ID NO: 14352 - protein, 11 aa, Homo sapiens
VWVSSQDCSLK

SEQ ID NO: 14353 - protein, 12 aa, Homo sapiens
EESSATIYCSIR

SEQ ID NO: 14354 - protein, 18 aa, Homo sapiens
SSLPVHVGQFCTDPGASR

SEQ ID NO: 14355 - protein, 9 aa, Homo sapiens
SVLYSWTPR

SEQ ID NO: 14356 - protein, 13 aa, Homo sapiens
NILFVITKPDVYK

SEQ ID NO: 14357 - protein, 14 aa, Homo sapiens
SPASDTYIVFGEAK

SEQ ID NO: 14358 - protein, 15 aa, Homo sapiens
IEDLSQQAQLAAAEK

SEQ ID NO: 14359 - protein, 13 aa, Homo sapiens
DIELVMSQANVSR

SEQ ID NO: 14360 - protein, 15 aa, Homo sapiens
NNSNDIVNAIMELTM

SEQ ID NO: 14361 - protein, 7 aa, Homo sapiens
FWHAATK

SEQ ID NO: 14362 - protein, 19 aa, Homo sapiens
SEGDSVGESVHGKPSVVYR

SEQ ID NO: 14363 - protein, 18 aa, Homo sapiens
VDPSLMEDSDDGPSLPTK

SEQ ID NO: 14364 - protein, 13 aa, Homo sapiens
SEGDSVGESVHGK

SEQ ID NO: 14365 - protein, 11 aa, Homo sapiens
LGQIYQSWLDK

SEQ ID NO: 14366 - protein, 9 aa, Homo sapiens
EYTAAVEAK

SEQ ID NO: 14367 - protein, 7 aa, Homo sapiens
GSDSLIK

SEQ ID NO: 14368 - protein, 11 aa, Homo sapiens
VLPSIVNEVLK

SEQ ID NO: 14369 - protein, 8 aa, Homo sapiens
MLGEALSK

SEQ ID NO: 14370 - protein, 12 aa, Homo sapiens
IVQAEGEAEAAK

SEQ ID NO: 14371 - protein, 7 aa, Homo sapiens
AQFLVEK

SEQ ID NO: 14372 - protein, 8 aa, Homo sapiens
AQVSLLIR

SEQ ID NO: 14373 - protein, 10 aa, Homo sapiens
DLQMVNISLR

SEQ ID NO: 14374 - protein, 11 aa, Homo sapiens
ESVFTVEGGHR

SEQ ID NO: 14375 - protein, 10 aa, Homo sapiens
FNASQLITQR

SEQ ID NO: 14376 - protein, 17 aa, Homo sapiens
IGGVQQDTILAEGLHFR

SEQ ID NO: 14377 - protein, 13 aa, Homo sapiens
IPWFQYPIIYDIR

SEQ ID NO: 14378 - protein, 19 aa, Homo sapiens
IYLTADNLVLNLQDESFTR

SEQ ID NO: 14379 - protein, 8 aa, Homo sapiens
LGLDYEER

SEQ ID NO: 14380 - protein, 13 aa, Homo sapiens
LLLGAGAVAYGVR

SEQ ID NO: 14381 - protein, 12 aa, Homo sapiens
PNAQELPSMYQR

SEQ ID NO: 14382 - protein, 16 aa, Homo sapiens
VLSRPNAQELPSMYQR

SEQ ID NO: 14383 - protein, 12 aa, Homo sapiens
QHSSQDVHVVLK

SEQ ID NO: 14384 - protein, 17 aa, Homo sapiens
LGAAPEEESAYVAGEKR

SEQ ID NO: 14385 - protein, 23 aa, Homo sapiens
LAHGGQVNLDMEDHRDEDFVKPK

SEQ ID NO: 14386 - protein, 16 aa, Homo sapiens
LGAAPEEESAYVAGEK

SEQ ID NO: 14387 - protein, 23 aa, Homo sapiens
LGSTAPQVLSTSSPAQQAENEAK

SEQ ID NO: 14388 - protein, 10 aa, Homo sapiens
ELADESQTLK

SEQ ID NO: 14389 - protein, 11 aa, Homo sapiens
SPNELVDDLFK

SEQ ID NO: 14390 - protein, 17 aa, Homo sapiens
DLIHDQDEDEEEEEGQR

SEQ ID NO: 14391 - protein, 12 aa, Homo sapiens
EFVAVTGAEEDR

SEQ ID NO: 14392 - protein, 7 aa, Homo sapiens
LFIVDAR

SEQ ID NO: 14393 - protein, 9 aa, Homo sapiens
RGEVPAELR

SEQ ID NO: 14394 - protein, 10 aa, Homo sapiens
RGEVPAELRR

SEQ ID NO: 14395 - protein, 11 aa, Homo sapiens
SGFSLDNGELR

SEQ ID NO: 14396 - protein, 10 aa, Homo sapiens
SGQQIVGPPR

SEQ ID NO: 14397 - protein, 15 aa, Homo sapiens
SYQDPSNAQFLESIR

SEQ ID NO: 14398 - protein, 15 aa, Homo sapiens
IFDDVSSGVSQLASK

SEQ ID NO: 14399 - protein, 20 aa, Homo sapiens
AFEDWLNDDLGSYQGAQGNR

SEQ ID NO: 14400 - protein, 18 aa, Homo sapiens
EWSLESSPAQNWTPPQPR

SEQ ID NO: 14401 - protein, 12 aa, Homo sapiens
TVNEPWTMGFSK

SEQ ID NO: 14402 - protein, 16 aa, Homo sapiens
NTDSDVNLVVPLEVIK

SEQ ID NO: 14403 - protein, 11 aa, Homo sapiens
HFVPMGLYIVR

SEQ ID NO: 14404 - protein, 10 aa, Homo sapiens
LFWEWGDGIR

SEQ ID NO: 14405 - protein, 10 aa, Homo sapiens
MANMDFVFDR

SEQ ID NO: 14406 - protein, 12 aa, Homo sapiens
SVFDVLDGEEMR

SEQ ID NO: 14407 - protein, 16 aa, Homo sapiens
EIVEVKEENIEDATEK

SEQ ID NO: 14408 - protein, 25 aa, Homo sapiens
ITEAPASEKEIVEVKEENIEDATEK

SEQ ID NO: 14409 - protein, 15 aa, Homo sapiens
LSAMLVPVTPEVKPK

SEQ ID NO: 14410 - protein, 11 aa, Homo sapiens
LEQDQLWIGTK

SEQ ID NO: 14411 - protein, 18 aa, Homo sapiens
IMVVGSTINDVLAVNTPK

SEQ ID NO: 14412 - protein, 12 aa, Homo sapiens
LPTVPLSGMYNK

SEQ ID NO: 14413 - protein, 18 aa, Homo sapiens
LLEPLVTQVTTLVNTSNK

SEQ ID NO: 14414 - protein, 9 aa, Homo sapiens
LLSETVMPR

SEQ ID NO: 14415 - protein, 15 aa, Homo sapiens
GYAYVEFENPDEAEK

SEQ ID NO: 14416 - protein, 12 aa, Homo sapiens
DHIMEIFSTYGK

SEQ ID NO: 14417 - protein, 27 aa, Homo sapiens
HMDGGQIDGQEITATAVLAPWPRPPPR

SEQ ID NO: 14418 - protein, 8 aa, Homo sapiens
MIDMPVER

SEQ ID NO: 14419 - protein, 17 aa, Homo sapiens
KEGKPTIVEEDDPELFK

SEQ ID NO: 14420 - protein, 7 aa, Homo sapiens
TFLRPPK

SEQ ID NO: 14421 - protein, 9 aa, Homo sapiens
ALDVIQAGK

SEQ ID NO: 14422 - protein, 16 aa, Homo sapiens
EGKPTIVEEDDPELFK

SEQ ID NO: 14423 - protein, 8 aa, Homo sapiens
LFAELEIK

SEQ ID NO: 14424 - protein, 11 aa, Homo sapiens
QREEEIEAQEK

SEQ ID NO: 14425 - protein, 17 aa, Homo sapiens
QLSILVHPDKNQDDADR

SEQ ID NO: 14426 - protein, 8 aa, Homo sapiens
LLLDQEQK

SEQ ID NO: 14427 - protein, 30 aa, Homo sapiens
LTRPGSSYFNLNPFEVLQIDPEVTDEEIKK

SEQ ID NO: 14428 - protein, 9 aa, Homo sapiens
LFGTTVTFK

SEQ ID NO: 14429 - protein, 8 aa, Homo sapiens
KGSLLVAR

SEQ ID NO: 14430 - protein, 15 aa, Homo sapiens
FDDHKGPTISLTQIV

SEQ ID NO: 14431 - protein, 7 aa, Homo sapiens
HWFTMER

SEQ ID NO: 14432 - protein, 7 aa, Homo sapiens
LSLTYER

SEQ ID NO: 14433 - protein, 7 aa, Homo sapiens
IQELQEK

SEQ ID NO: 14434 - protein, 21 aa, Homo sapiens
TELEETTAEAEEEIQALTAHR

SEQ ID NO: 14435 - protein, 13 aa, Homo sapiens
PDISPYFGLFYEK

SEQ ID NO: 14436 - protein, 7 aa, Homo sapiens
IVEWNGK

SEQ ID NO: 14437 - protein, 8 aa, Homo sapiens
EIIEAMLK

SEQ ID NO: 14438 - protein, 12 aa, Homo sapiens
KLDDFVETGDIR

SEQ ID NO: 14439 - protein, 10 aa, Homo sapiens
TSLDWWITDK

SEQ ID NO: 14440 - protein, 30 aa, Homo sapiens
FVSAIEGMHPNQEDHETFVDINPLTGIILK

SEQ ID NO: 14441 - protein, 8 aa, Homo sapiens
AVDQSIEK

SEQ ID NO: 14442 - protein, 13 aa, Homo sapiens
DEVLYVFPSDFCR

SEQ ID NO: 14443 - protein, 13 aa, Homo sapiens
GQGSMDEGTADER

SEQ ID NO: 14444 - protein, 18 aa, Homo sapiens
NGAPIIMSFPHFYQADER

SEQ ID NO: 14445 - protein, 10 aa, Homo sapiens
VEEVGPYTYR

SEQ ID NO: 14446 - protein, 23 aa, Homo sapiens
LEAPFTQDDTLGLENSHPVWTQK

SEQ ID NO: 14447 - protein, 12 aa, Homo sapiens
AETPHGAEEECR

SEQ ID NO: 14448 - protein, 8 aa, Homo sapiens
CVEDYLAR

SEQ ID NO: 14449 - protein, 12 aa, Homo sapiens
LQLANEEIAQVR

SEQ ID NO: 14450 - protein, 20 aa, Homo sapiens
VSGSPEQAVEENLSSYSLDR

SEQ ID NO: 14451 - protein, 13 aa, Homo sapiens
VTPASETLEDPCR

SEQ ID NO: 14452 - protein, 10 aa, Homo sapiens
ILVPIQQVLK

SEQ ID NO: 14453 - protein, 16 aa, Homo sapiens
VINEPTAAAMAYGLHK

SEQ ID NO: 14454 - protein, 13 aa, Homo sapiens
KLFDTLNEDLFQK

SEQ ID NO: 14455 - protein, 7 aa, Homo sapiens
LLQYLYK

SEQ ID NO: 14456 - protein, 9 aa, Homo sapiens
LGGQDFNQR

SEQ ID NO: 14457 - protein, 12 aa, Homo sapiens
QIYQTYGFVPSR

SEQ ID NO: 14458 - protein, 13 aa, Homo sapiens
KIGEEEIQKPEEK

SEQ ID NO: 14459 - protein, 15 aa, Homo sapiens
RTDIFGVEETAIGKK

SEQ ID NO: 14460 - protein, 13 aa, Homo sapiens
TDIFGVEETAIGK

SEQ ID NO: 14461 - protein, 7 aa, Homo sapiens
LVEQYTK

SEQ ID NO: 14462 - protein, 23 aa, Homo sapiens
ASKPLPPAPAPDEYLVSPITGEK

SEQ ID NO: 14463 - protein, 9 aa, Homo sapiens
LQYEGIFIK

SEQ ID NO: 14464 - protein, 16 aa, Homo sapiens
VMQQQQQTTQQQLPQK

SEQ ID NO: 14465 - protein, 18 aa, Homo sapiens
QSDDEVYAPGLDIESSLK

SEQ ID NO: 14466 - protein, 12 aa, Homo sapiens
IGEEEIQKPEEK

SEQ ID NO: 14467 - protein, 20 aa, Homo sapiens
EDSAPSKPVVGIIYPPPEVR

SEQ ID NO: 14468 - protein, 19 aa, Homo sapiens
PAGPVQAVPPPPPVPTEPK

SEQ ID NO: 14469 - protein, 20 aa, Homo sapiens
TQQAAQANITLQEQIEAIHK

SEQ ID NO: 14470 - protein, 24 aa, Homo sapiens
EPPPEFEFIADPPSISAFDLDVVK

SEQ ID NO: 14471 - protein, 14 aa, Homo sapiens
RTDIFGVEETAIGK

SEQ ID NO: 14472 - protein, 11 aa, Homo sapiens
IHEATGMPAGK

SEQ ID NO: 14473 - protein, 13 aa, Homo sapiens
VQAQVIQETIVPK

SEQ ID NO: 14474 - protein, 9 aa, Homo sapiens
QFLTQLMQK

SEQ ID NO: 14475 - protein, 20 aa, Homo sapiens
EKQSDDEVYAPGLDIESSLK

SEQ ID NO: 14476 - protein, 10 aa, Homo sapiens
AQEPSAAIPK

SEQ ID NO: 14477 - protein, 9 aa, Homo sapiens
EVLDQVCYR

SEQ ID NO: 14478 - protein, 15 aa, Homo sapiens
FNFLNPNDPYHAYYR

SEQ ID NO: 14479 - protein, 7 aa, Homo sapiens
IGLLDPR

SEQ ID NO: 14480 - protein, 8 aa, Homo sapiens
LTAQFVAR

SEQ ID NO: 14481 - protein, 8 aa, Homo sapiens
NGPEFEAR

SEQ ID NO: 14482 - protein, 13 aa, Homo sapiens
TEDSLMPEEEFLR

SEQ ID NO: 14483 - protein, 12 aa, Homo sapiens
VTWDGHSGSMAR

SEQ ID NO: 14484 - protein, 16 aa, Homo sapiens
SYGRPPPDVEGMTSLK

SEQ ID NO: 14485 - protein, 17 aa, Homo sapiens
DAEDAMDAMDGAVLDGR

SEQ ID NO: 14486 - protein, 8 aa, Homo sapiens
TSPDTLRR

SEQ ID NO: 14487 - protein, 7 aa, Homo sapiens
VDNLTYR

SEQ ID NO: 14488 - protein, 8 aa, Homo sapiens
VGDVYIPR

SEQ ID NO: 14489 - protein, 8 aa, Homo sapiens
YGGGGYGR

SEQ ID NO: 14490 - protein, 11 aa, Homo sapiens
YGRPPDSHHSR

SEQ ID NO: 14491 - protein, 14 aa, Homo sapiens
LYSIILSAPIPEPK

SEQ ID NO: 14492 - protein, 30 aa, Homo sapiens
KTTDEELEEMLESGNPAIFTSGIIDSQISK

SEQ ID NO: 14493 - protein, 8 aa, Homo sapiens
KFVEVMTK

SEQ ID NO: 14494 - protein, 9 aa, Homo sapiens
QALSEIEGR

SEQ ID NO: 14495 - protein, 9 aa, Homo sapiens
YNEAQVDFR

SEQ ID NO: 14496 - protein, 18 aa, Homo sapiens
EMDPVTQLYTMTSTLEYK

SEQ ID NO: 14497 - protein, 11 aa, Homo sapiens
SVQYDDVPEYK

SEQ ID NO: 14498 - protein, 29 aa, Homo sapiens
SSPSFSSLHYQDAGNYVCETALQEVEGLK

SEQ ID NO: 14499 - protein, 14 aa, Homo sapiens
YEKPDGSPVFIAFR

SEQ ID NO: 14500 - protein, 16 aa, Homo sapiens
QIGDALPVSCTISASR

SEQ ID NO: 14501 - protein, 11 aa, Homo sapiens
SSNTYTLTDVR

SEQ ID NO: 14502 - protein, 10 aa, Homo sapiens
EYTEDGQVKK

SEQ ID NO: 14503 - protein, 10 aa, Homo sapiens
GDQLVPFSTK

SEQ ID NO: 14504 - protein, 15 aa, Homo sapiens
FFLSSGLIDKVDNFK

SEQ ID NO: 14505 - protein, 12 aa, Homo sapiens
QRGDQLVPFSTK

SEQ ID NO: 14506 - protein, 10 aa, Homo sapiens
FFLSSGLIDK

SEQ ID NO: 14507 - protein, 15 aa, Homo sapiens
LLSDPNYGVHLPAVK

SEQ ID NO: 14508 - protein, 8 aa, Homo sapiens
DLVNIGLK

SEQ ID NO: 14509 - protein, 12 aa, Homo sapiens
RGDFFYHSENPK

SEQ ID NO: 14510 - protein, 11 aa, Homo sapiens
GDFFYHSENPK

SEQ ID NO: 14511 - protein, 14 aa, Homo sapiens
HVEMYQWVETEESR

SEQ ID NO: 14512 - protein, 10 aa, Homo sapiens
LEDPHVDIIR

SEQ ID NO: 14513 - protein, 21 aa, Homo sapiens
NPSAMAVESFMATAPFVQIGR

SEQ ID NO: 14514 - protein, 21 aa, Homo sapiens
SGDTLLLLHHGDFSAEEVFHR

SEQ ID NO: 14515 - protein, 26 aa, Homo sapiens
VSFSYAGLSGDDPDLGPAHVVTVIAR

SEQ ID NO: 14516 - protein, 8 aa, Homo sapiens
YPEVGDLR

SEQ ID NO: 14517 - protein, 8 aa, Homo sapiens
YSYNTEWR

SEQ ID NO: 14518 - protein, 26 aa, Homo sapiens
EVPAESVTVWIDPLDATQEYTEDLRK

SEQ ID NO: 14519 - protein, 10 aa, Homo sapiens
MTSGDVLSNR

SEQ ID NO: 14520 - protein, 9 aa, Homo sapiens
ATVTPSPVK

SEQ ID NO: 14521 - protein, 19 aa, Homo sapiens
VVDYSQFQESDDADEDYGR

SEQ ID NO: 14522 - protein, 14 aa, Homo sapiens
PSAAPPHEPTMKMR

SEQ ID NO: 14523 - protein, 14 aa, Homo sapiens
MLEDMTTGTESETK

SEQ ID NO: 14524 - protein, 17 aa, Homo sapiens
MASTFIGNSTAIQELFK

SEQ ID NO: 14525 - protein, 11 aa, Homo sapiens
LEEEQKEEEER

SEQ ID NO: 14526 - protein, 19 aa, Homo sapiens
AASAGQEPLHNEELAGAGR

SEQ ID NO: 14527 - protein, 17 aa, Homo sapiens
IQDLLAEGTITGVIDDR

SEQ ID NO: 14528 - protein, 13 aa, Homo sapiens
VAQPGPLEPEEPR

SEQ ID NO: 14529 - protein, 18 aa, Homo sapiens
VSIAELAQASNSLIAWGR

SEQ ID NO: 14530 - protein, 14 aa, Homo sapiens
VVLLEDLASQVGLR

SEQ ID NO: 14531 - protein, 19 aa, Homo sapiens
APEQEQAAPGPAAGGEAPK

SEQ ID NO: 14532 - protein, 14 aa, Homo sapiens
EKPDQDAEGKAEEK

SEQ ID NO: 14533 - protein, 15 aa, Homo sapiens
EGEKDAAAAKEEAPK

SEQ ID NO: 14534 - protein, 21 aa, Homo sapiens
SDGAPASDSKPGSSEAAPSSK

SEQ ID NO: 14535 - protein, 28 aa, Homo sapiens
AAEAAAAPAESAAPAAGEEPSKEEGEPK

SEQ ID NO: 14536 - protein, 14 aa, Homo sapiens
KTEAPAAPAAQETK

SEQ ID NO: 14537 - protein, 13 aa, Homo sapiens
AEPEKTEGAAEAK

SEQ ID NO: 14538 - protein, 24 aa, Homo sapiens
AEPPKAPEQEQAAPGPAAGGEAPK

SEQ ID NO: 14539 - protein, 13 aa, Homo sapiens
AEGAATEEEGTPK

SEQ ID NO: 14540 - protein, 14 aa, Homo sapiens
ETPAATEAPSSTPK

SEQ ID NO: 14541 - protein, 14 aa, Homo sapiens
KAEGAATEEEGTPK

SEQ ID NO: 14542 - protein, 14 aa, Homo sapiens
ESEPQAAAEPAEAK

SEQ ID NO: 14543 - protein, 29 aa, Homo sapiens
AQGPAASAEEPKPVEAPAANSDQTVTVKE

SEQ ID NO: 14544 - protein, 12 aa, Homo sapiens
KQYDTYGEEGLK

SEQ ID NO: 14545 - protein, 14 aa, Homo sapiens
KGEGLPNFDNNNIK

SEQ ID NO: 14546 - protein, 16 aa, Homo sapiens
FQDLGAAYEVLSDSEK

SEQ ID NO: 14547 - protein, 17 aa, Homo sapiens
FQDLGAAYEVLSDSEKR

SEQ ID NO: 14548 - protein, 11 aa, Homo sapiens
QYDTYGEEGLK

SEQ ID NO: 14549 - protein, 20 aa, Homo sapiens
KLALQLHPDRNPDDPQAQEK

SEQ ID NO: 14550 - protein, 16 aa, Homo sapiens
FQMTQEVVCDECPNVK

SEQ ID NO: 14551 - protein, 19 aa, Homo sapiens
LALQLHPDRNPDDPQAQEK

SEQ ID NO: 14552 - protein, 23 aa, Homo sapiens
DGMEYPFIGEGEPHVDGEPGDLR

SEQ ID NO: 14553 - protein, 8 aa, Homo sapiens
EQLTEEAR

SEQ ID NO: 14554 - protein, 11 aa, Homo sapiens
TLEVEIEPGVR

SEQ ID NO: 14555 - protein, 8 aa, Homo sapiens
TTQLGPGR

SEQ ID NO: 14556 - protein, 11 aa, Homo sapiens
TAASAPANVSK

SEQ ID NO: 14557 - protein, 20 aa, Homo sapiens
AAQLPNDVVLQIMELCGATR

SEQ ID NO: 14558 - protein, 12 aa, Homo sapiens
LVAVAQSGFPLR

SEQ ID NO: 14559 - protein, 30 aa, Homo sapiens
SSSSQTLTQFDSNIAPADPDTAIVHPVPIR

SEQ ID NO: 14560 - protein, 16 aa, Homo sapiens
TGVLAAVLASQPSIPR

SEQ ID NO: 14561 - protein, 13 aa, Homo sapiens
ALGWAAVYLSTCK

SEQ ID NO: 14562 - protein, 11 aa, Homo sapiens
GAPAPHCEMSR

SEQ ID NO: 14563 - protein, 26 aa, Homo sapiens
HHSDGSVSLSGHLQPPPVTTEQHGAR

SEQ ID NO: 14564 - protein, 11 aa, Homo sapiens
IHHPSLPASGR

SEQ ID NO: 14565 - protein, 8 aa, Homo sapiens
RPGALLLR

SEQ ID NO: 14566 - protein, 10 aa, Homo sapiens
VSLMPATLAR

SEQ ID NO: 14567 - protein, 13 aa, Homo sapiens
WASGLTPAQNCPR

SEQ ID NO: 14568 - protein, 12 aa, Homo sapiens
FLPAVSDENSKR

SEQ ID NO: 14569 - protein, 8 aa, Homo sapiens
LGSVEAPK

SEQ ID NO: 14570 - protein, 9 aa, Homo sapiens
TSYMAQLMK

SEQ ID NO: 14571 - protein, 12 aa, Homo sapiens
GISAGAVQTAGK

SEQ ID NO: 14572 - protein, 11 aa, Homo sapiens
FLPAVSDENSK

SEQ ID NO: 14573 - protein, 15 aa, Homo sapiens
VLLDAPCSGTGVISK

SEQ ID NO: 14574 - protein, 9 aa, Homo sapiens
GVNLDPLGK

SEQ ID NO: 14575 - protein, 16 aa, Homo sapiens
TQASSSFQDSSQPAGK

SEQ ID NO: 14576 - protein, 11 aa, Homo sapiens
KGPQSLFNAPR

SEQ ID NO: 14577 - protein, 14 aa, Homo sapiens
GTDTQTPAVLSPSK

SEQ ID NO: 14578 - protein, 15 aa, Homo sapiens
ELLLSAIDSVNATSK

SEQ ID NO: 14579 - protein, 11 aa, Homo sapiens
ILDMCCAPGGK

SEQ ID NO: 14580 - protein, 10 aa, Homo sapiens
QQLPEQPFEK

SEQ ID NO: 14581 - protein, 14 aa, Homo sapiens
GADSELSTVPSVTK

SEQ ID NO: 14582 - protein, 9 aa, Homo sapiens
DLAQALINR

SEQ ID NO: 14583 - protein, 8 aa, Homo sapiens
GAETELVR

SEQ ID NO: 14584 - protein, 11 aa, Homo sapiens
GPQPPTVSPIR

SEQ ID NO: 14585 - protein, 9 aa, Homo sapiens
IQDIVGILR

SEQ ID NO: 14586 - protein, 14 aa, Homo sapiens
LGVTNTIISHYDGR

SEQ ID NO: 14587 - protein, 15 aa, Homo sapiens
LVPTGLDFGQEGFTR

SEQ ID NO: 14588 - protein, 14 aa, Homo sapiens
NTGVILANDANAER

SEQ ID NO: 14589 - protein, 8 aa, Homo sapiens
SVVGNLHR

SEQ ID NO: 14590 - protein, 19 aa, Homo sapiens
EVQLVESGGGLVKPGGSLR

SEQ ID NO: 14591 - protein, 8 aa, Homo sapiens
DPQTEEFK

SEQ ID NO: 14592 - protein, 19 aa, Homo sapiens
MNAQETATGMAFEEPIDEK

SEQ ID NO: 14593 - protein, 17 aa, Homo sapiens
TEDGGEFEEGASENNAK

SEQ ID NO: 14594 - protein, 7 aa, Homo sapiens
LHVEVAK

SEQ ID NO: 14595 - protein, 15 aa, Homo sapiens
DPEEADYCIQTLDGR

SEQ ID NO: 14596 - protein, 9 aa, Homo sapiens
ESEEGNPVR

SEQ ID NO: 14597 - protein, 13 aa, Homo sapiens
GWEAFLNAPEANR

SEQ ID NO: 14598 - protein, 11 aa, Homo sapiens
HPDGVASVSFR

SEQ ID NO: 14599 - protein, 26 aa, Homo sapiens
HPDGVASVSFRDPEEADYCIQTLDGR

SEQ ID NO: 14600 - protein, 8 aa, Homo sapiens
LLDEDEIR

SEQ ID NO: 14601 - protein, 15 aa, Homo sapiens
LRGWEAFLNAPEANR

SEQ ID NO: 14602 - protein, 19 aa, Homo sapiens
NMFHPMDFEDDPLVLNEIR

SEQ ID NO: 14603 - protein, 9 aa, Homo sapiens
NVCSEAAQK

SEQ ID NO: 14604 - protein, 21 aa, Homo sapiens
TQFPSLDIEVDGGVGPDTVHK

SEQ ID NO: 14605 - protein, 19 aa, Homo sapiens
IGPSILNSDLANLGAECLR

SEQ ID NO: 14606 - protein, 7 aa, Homo sapiens
SVINLLR

SEQ ID NO: 14607 - protein, 13 aa, Homo sapiens
SSKVLESSDHKLK

SEQ ID NO: 14608 - protein, 9 aa, Homo sapiens
SPIVLVENK

SEQ ID NO: 14609 - protein, 12 aa, Homo sapiens
AYPHNLMTFQMK

SEQ ID NO: 14610 - protein, 8 aa, Homo sapiens
LFYFSNEK

SEQ ID NO: 14611 - protein, 11 aa, Homo sapiens
EHSAFQAPAVK

SEQ ID NO: 14612 - protein, 7 aa, Homo sapiens
FINFQLR

SEQ ID NO: 14613 - protein, 14 aa, Homo sapiens
LDFSTGNFNVLAVR

SEQ ID NO: 14614 - protein, 21 aa, Homo sapiens
KPRPPPALGPEETSASAGLPK

SEQ ID NO: 14615 - protein, 7 aa, Homo sapiens
MEGIGLK

SEQ ID NO: 14616 - protein, 7 aa, Homo sapiens
LTDYISK

SEQ ID NO: 14617 - protein, 11 aa, Homo sapiens
AWDDFFPGSDR

SEQ ID NO: 14618 - protein, 9 aa, Homo sapiens
MDVNIAPLR

SEQ ID NO: 14619 - protein, 20 aa, Homo sapiens
RTPMGIVLDALEQQEEGINR

SEQ ID NO: 14620 - protein, 19 aa, Homo sapiens
TPMGIVLDALEQQEEGINR

SEQ ID NO: 14621 - protein, 15 aa, Homo sapiens
SVAVYGGGSMWEQAK

SEQ ID NO: 14622 - protein, 12 aa, Homo sapiens
KLNIGGGGLGYR

SEQ ID NO: 14623 - protein, 13 aa, Homo sapiens
GFGFGGFAISAGK

SEQ ID NO: 14624 - protein, 12 aa, Homo sapiens
KANAEELANNLK

SEQ ID NO: 14625 - protein, 20 aa, Homo sapiens
IIDPLPPIDHSEIDYPPFEK

SEQ ID NO: 14626 - protein, 20 aa, Homo sapiens
LPQQSHSAFGATSSSSGFGK

SEQ ID NO: 14627 - protein, 26 aa, Homo sapiens
VVQGDIGEANEDVTQIVEILHSGPSK

SEQ ID NO: 14628 - protein, 22 aa, Homo sapiens
GNNNVMSNYEAYKPSTGAMGDR

SEQ ID NO: 14629 - protein, 22 aa, Homo sapiens
KSEYTQPTPIQCQGVPVALSGR

SEQ ID NO: 14630 - protein, 11 aa, Homo sapiens
NLEGANQHVSK

SEQ ID NO: 14631 - protein, 8 aa, Homo sapiens
DILIDPIR

SEQ ID NO: 14632 - protein, 13 aa, Homo sapiens
DIPVLVATDVAAR

SEQ ID NO: 14633 - protein, 17 aa, Homo sapiens
ELEPGDGPIAVIVCPTR

SEQ ID NO: 14634 - protein, 13 aa, Homo sapiens
ELLDLAMQNAWFR

SEQ ID NO: 14635 - protein, 17 aa, Homo sapiens
GIRDDIEEEDDQEAYFR

SEQ ID NO: 14636 - protein, 11 aa, Homo sapiens
LNIGGGGLGYR

SEQ ID NO: 14637 - protein, 21 aa, Homo sapiens
NFYNEHEEITNLTPQQLIDLR

SEQ ID NO: 14638 - protein, 18 aa, Homo sapiens
QEGHNLGLLHGDMDQSER

SEQ ID NO: 14639 - protein, 21 aa, Homo sapiens
SEYTQPTPIQCQGVPVALSGR

SEQ ID NO: 14640 - protein, 11 aa, Homo sapiens
VSYLVFDEADR

SEQ ID NO: 14641 - protein, 11 aa, Homo sapiens
LHQMWLSWNQK

SEQ ID NO: 14642 - protein, 22 aa, Homo sapiens
VASMPLISSTCDMVSAAYASTK

SEQ ID NO: 14643 - protein, 16 aa, Homo sapiens
TLTAAAVSGAQPILSK

SEQ ID NO: 14644 - protein, 18 aa, Homo sapiens
GLDKLEENLPILQQPTEK

SEQ ID NO: 14645 - protein, 12 aa, Homo sapiens
VSGAQEMVSSAK

SEQ ID NO: 14646 - protein, 15 aa, Homo sapiens
DTVATQLSEAVDATR

SEQ ID NO: 14647 - protein, 17 aa, Homo sapiens
IATSLDGFDVASVQQQR

SEQ ID NO: 14648 - protein, 14 aa, Homo sapiens
LEPQIASASEYAHR

SEQ ID NO: 14649 - protein, 7 aa, Homo sapiens
LGSLSER

SEQ ID NO: 14650 - protein, 8 aa, Homo sapiens
QEQSYFVR

SEQ ID NO: 14651 - protein, 28 aa, Homo sapiens
RQVEDLQATFSSIHSFQDLSSSILAQSR

SEQ ID NO: 14652 - protein, 18 aa, Homo sapiens
SEEWADNHLPLTDAELAR

SEQ ID NO: 14653 - protein, 14 aa, Homo sapiens
SVVTGGVQSVMGSR

SEQ ID NO: 14654 - protein, 10 aa, Homo sapiens
YGIPEPPEPK

SEQ ID NO: 14655 - protein, 14 aa, Homo sapiens
ESATADAGYAILEK

SEQ ID NO: 14656 - protein, 26 aa, Homo sapiens
TEQGEEEEEEEDEEEEEKASNIVMLR

SEQ ID NO: 14657 - protein, 15 aa, Homo sapiens
WMEANQHSLNILGQK

SEQ ID NO: 14658 - protein, 11 aa, Homo sapiens
DGLGSDNIGSR

SEQ ID NO: 14659 - protein, 15 aa, Homo sapiens
GFAFVEFSHLQDATR

SEQ ID NO: 14660 - protein, 11 aa, Homo sapiens
GQLQSHGVQAR

SEQ ID NO: 14661 - protein, 7 aa, Homo sapiens
LACLLCR

SEQ ID NO: 14662 - protein, 11 aa, Homo sapiens
LDQQTLPLGGR

SEQ ID NO: 14663 - protein, 12 aa, Homo sapiens
MLPQAATEDDIR

SEQ ID NO: 14664 - protein, 27 aa, Homo sapiens
NLNPHSTMDSILGALAPYAVLSSSNVR

SEQ ID NO: 14665 - protein, 10 aa, Homo sapiens
NSFQPISSLR

SEQ ID NO: 14666 - protein, 12 aa, Homo sapiens
QGIVTPIEAQTR

SEQ ID NO: 14667 - protein, 10 aa, Homo sapiens
RPYQDMEYER

SEQ ID NO: 14668 - protein, 16 aa, Homo sapiens
YGGISTASVDFEQPTR

SEQ ID NO: 14669 - protein, 13 aa, Homo sapiens
TSIISLTPWKPSK

SEQ ID NO: 14670 - protein, 15 aa, Homo sapiens
LFESSENIEDSNNPK

SEQ ID NO: 14671 - protein, 11 aa, Homo sapiens
STLLADDLEIK

SEQ ID NO: 14672 - protein, 17 aa, Homo sapiens
SPFADGETPDICMDNIR

SEQ ID NO: 14673 - protein, 14 aa, Homo sapiens
GFAFVTFESPADAK

SEQ ID NO: 14674 - protein, 13 aa, Homo sapiens
LFIGGLNTETNEK

SEQ ID NO: 14675 - protein, 8 aa, Homo sapiens
IVEVLLMK

SEQ ID NO: 14676 - protein, 8 aa, Homo sapiens
VEADRPGK

SEQ ID NO: 14677 - protein, 8 aa, Homo sapiens
ALEAVFGK

SEQ ID NO: 14678 - protein, 13 aa, Homo sapiens
VEQATKPSFESGR

SEQ ID NO: 14679 - protein, 14 aa, Homo sapiens
DRDYSDHPSGGSYR

SEQ ID NO: 14680 - protein, 10 aa, Homo sapiens
DSYESYGNSR

SEQ ID NO: 14681 - protein, 8 aa, Homo sapiens
DSYGGPPR

SEQ ID NO: 14682 - protein, 9 aa, Homo sapiens
DSYGGPPRR

SEQ ID NO: 14683 - protein, 7 aa, Homo sapiens
DVYLSPR

SEQ ID NO: 14684 - protein, 12 aa, Homo sapiens
DYSDHPSGGSYR

SEQ ID NO: 14685 - protein, 19 aa, Homo sapiens
GGHMDDGGYSMNFNMSSSR

SEQ ID NO: 14686 - protein, 11 aa, Homo sapiens
GPPPSYGGSSR

SEQ ID NO: 14687 - protein, 10 aa, Homo sapiens
GYSDRDGYGR

SEQ ID NO: 14688 - protein, 8 aa, Homo sapiens
RDVYLSPR

SEQ ID NO: 14689 - protein, 7 aa, Homo sapiens
REPLPSR

SEQ ID NO: 14690 - protein, 8 aa, Homo sapiens
RGPPPPPR

SEQ ID NO: 14691 - protein, 8 aa, Homo sapiens
SDLYSSGR

SEQ ID NO: 14692 - protein, 8 aa, Homo sapiens
YDDYSSSR

SEQ ID NO: 14693 - protein, 23 aa, Homo sapiens
VLQQEAEIDSIHQLVVGATENIK

SEQ ID NO: 14694 - protein, 19 aa, Homo sapiens
ALGVAVGGGVDGSRDELFR

SEQ ID NO: 14695 - protein, 9 aa, Homo sapiens
AVDITLLFR

SEQ ID NO: 14696 - protein, 12 aa, Homo sapiens
TAVLDFIEDYLK

SEQ ID NO: 14697 - protein, 10 aa, Homo sapiens
TCSEAIQQLR

SEQ ID NO: 14698 - protein, 12 aa, Homo sapiens
ALEKEEEEEKQK

SEQ ID NO: 14699 - protein, 7 aa, Homo sapiens
SMWTEHK

SEQ ID NO: 14700 - protein, 8 aa, Homo sapiens
SNLHAMIK

SEQ ID NO: 14701 - protein, 10 aa, Homo sapiens
ALEKEEEEEK

SEQ ID NO: 14702 - protein, 12 aa, Homo sapiens
VPSNASWEQAMK

SEQ ID NO: 14703 - protein, 20 aa, Homo sapiens
ELEDLEGYQNTIVAGSLITK

SEQ ID NO: 14704 - protein, 16 aa, Homo sapiens
FVKEPAFEDITLESER

SEQ ID NO: 14705 - protein, 17 aa, Homo sapiens
FTNMLGQPGSTALDLFK

SEQ ID NO: 14706 - protein, 10 aa, Homo sapiens
QETVADFTPK

SEQ ID NO: 14707 - protein, 10 aa, Homo sapiens
STTLDAGNIK

SEQ ID NO: 14708 - protein, 7 aa, Homo sapiens
FYVEDLK

SEQ ID NO: 14709 - protein, 9 aa, Homo sapiens
TYYYNTETK

SEQ ID NO: 14710 - protein, 9 aa, Homo sapiens
TPAEQLLSK

SEQ ID NO: 14711 - protein, 14 aa, Homo sapiens
SDSGKPYYYNSQTK

SEQ ID NO: 14712 - protein, 13 aa, Homo sapiens
RVPSNASWEQAMK

SEQ ID NO: 14713 - protein, 9 aa, Homo sapiens
LAFNSLLEK

SEQ ID NO: 14714 - protein, 17 aa, Homo sapiens
AEQMFGEMEVWNAISER

SEQ ID NO: 14715 - protein, 13 aa, Homo sapiens
EPAFEDITLESER

SEQ ID NO: 14716 - protein, 7 aa, Homo sapiens
MIINDPR

SEQ ID NO: 14717 - protein, 16 aa, Homo sapiens
QAAPPIELDAVWEDIR

SEQ ID NO: 14718 - protein, 10 aa, Homo sapiens
TLLEQLDDDQ

SEQ ID NO: 14719 - protein, 12 aa, Homo sapiens
MISAEAPVLFAK

SEQ ID NO: 14720 - protein, 9 aa, Homo sapiens
AWIHTEDNK

SEQ ID NO: 14721 - protein, 12 aa, Homo sapiens
AAQIFITELTLR

SEQ ID NO: 14722 - protein, 23 aa, Homo sapiens
GPGLNLPPPIGGAGPPLGLPKPK

SEQ ID NO: 14723 - protein, 20 aa, Homo sapiens
TILQGSSEGTGLSALLPQPK

SEQ ID NO: 14724 - protein, 21 aa, Homo sapiens
TSSLAPVVGTTTTTPSPSAIK

SEQ ID NO: 14725 - protein, 11 aa, Homo sapiens
GREEINFVEIK

SEQ ID NO: 14726 - protein, 14 aa, Homo sapiens
GDDQLSGAQQWMTK

SEQ ID NO: 14727 - protein, 9 aa, Homo sapiens
LLLPHAFSR

SEQ ID NO: 14728 - protein, 10 aa, Homo sapiens
LITTQQWLIK

SEQ ID NO: 14729 - protein, 8 aa, Homo sapiens
LRQPFFQK

SEQ ID NO: 14730 - protein, 15 aa, Homo sapiens
LNEQASEEILKVEQK

SEQ ID NO: 14731 - protein, 11 aa, Homo sapiens
LNEQASEEILK

SEQ ID NO: 14732 - protein, 7 aa, Homo sapiens
SSQTQNK

SEQ ID NO: 14733 - protein, 15 aa, Homo sapiens
ELNSNHDGADETSEK

SEQ ID NO: 14734 - protein, 13 aa, Homo sapiens
EFHLNESGDPSSK

SEQ ID NO: 14735 - protein, 10 aa, Homo sapiens
VEVTEFEDIK

SEQ ID NO: 14736 - protein, 14 aa, Homo sapiens
IDFYFDENPYFENK

SEQ ID NO: 14737 - protein, 29 aa, Homo sapiens
EQQEAIEHIDEVQNEIDRLNEQASEEILK

SEQ ID NO: 14738 - protein, 18 aa, Homo sapiens
EQQEAIEHIDEVQNEIDR

SEQ ID NO: 14739 - protein, 16 aa, Homo sapiens
KELNSNHDGADETSEK

SEQ ID NO: 14740 - protein, 10 aa, Homo sapiens
VKDLESLFHR

SEQ ID NO: 14741 - protein, 17 aa, Homo sapiens
DVMQQQLAEYQELLDVK

SEQ ID NO: 14742 - protein, 13 aa, Homo sapiens
NNSDKDQSLGNWR

SEQ ID NO: 14743 - protein, 10 aa, Homo sapiens
LELEQTYQAK

SEQ ID NO: 14744 - protein, 12 aa, Homo sapiens
AGGPATPLSPTR

SEQ ID NO: 14745 - protein, 8 aa, Homo sapiens
ALELENDR

SEQ ID NO: 14746 - protein, 11 aa, Homo sapiens
ALYESELADAR

SEQ ID NO: 14747 - protein, 14 aa, Homo sapiens
ATSSSSGSLSATGR

SEQ ID NO: 14748 - protein, 10 aa, Homo sapiens
EGELTVAQGR

SEQ ID NO: 14749 - protein, 10 aa, Homo sapiens
ELEEAMAGER

SEQ ID NO: 14750 - protein, 10 aa, Homo sapiens
GLESDVAELR

SEQ ID NO: 14751 - protein, 12 aa, Homo sapiens
GQSSWGTGESFR

SEQ ID NO: 14752 - protein, 12 aa, Homo sapiens
IRELEEAMAGER

SEQ ID NO: 14753 - protein, 11 aa, Homo sapiens
QVLEGEEIAYK

SEQ ID NO: 14754 - protein, 9 aa, Homo sapiens
RLVEVDSSR

SEQ ID NO: 14755 - protein, 8 aa, Homo sapiens
SVFEEEVR

SEQ ID NO: 14756 - protein, 14 aa, Homo sapiens
TVLVNADGEEVAMR

SEQ ID NO: 14757 - protein, 28 aa, Homo sapiens
GADINYANVDGLTALHQACIDDNVDMVK

SEQ ID NO: 14758 - protein, 10 aa, Homo sapiens
LKDENGALIR

SEQ ID NO: 14759 - protein, 9 aa, Homo sapiens
KDESPATWR

SEQ ID NO: 14760 - protein, 13 aa, Homo sapiens
LASTSDIEEKENR

SEQ ID NO: 14761 - protein, 16 aa, Homo sapiens
DYDGWTPLHAAAHWGK

SEQ ID NO: 14762 - protein, 9 aa, Homo sapiens
ISEMEEELK

SEQ ID NO: 14763 - protein, 15 aa, Homo sapiens
STQGVTLTDLQEAEK

SEQ ID NO: 14764 - protein, 10 aa, Homo sapiens
RISEMEEELK

SEQ ID NO: 14765 - protein, 14 aa, Homo sapiens
ILVDNLCDMEMVNK

SEQ ID NO: 14766 - protein, 14 aa, Homo sapiens
WIGSETDLEPPVVK

SEQ ID NO: 14767 - protein, 14 aa, Homo sapiens
AQLHDTNMELTDLK

SEQ ID NO: 14768 - protein, 11 aa, Homo sapiens
RLASTSDIEEK

SEQ ID NO: 14769 - protein, 11 aa, Homo sapiens
ESETSREDEYK

SEQ ID NO: 14770 - protein, 17 aa, Homo sapiens
SPLIESTANMDNNQSQK

SEQ ID NO: 14771 - protein, 12 aa, Homo sapiens
SGGTALHVAAAK

SEQ ID NO: 14772 - protein, 11 aa, Homo sapiens
LYEQILAENEK

SEQ ID NO: 14773 - protein, 11 aa, Homo sapiens
SLLSSTSTTTK

SEQ ID NO: 14774 - protein, 9 aa, Homo sapiens
ETQTDSISR

SEQ ID NO: 14775 - protein, 17 aa, Homo sapiens
ITTGSSSAGTQSSTSNR

SEQ ID NO: 14776 - protein, 10 aa, Homo sapiens
LAYVAPTIPR

SEQ ID NO: 14777 - protein, 12 aa, Homo sapiens
QWLNSGHINDVR

SEQ ID NO: 14778 - protein, 10 aa, Homo sapiens
SGSYSYLEER

SEQ ID NO: 14779 - protein, 15 aa, Homo sapiens
SYLTPVRDEESESQR

SEQ ID NO: 14780 - protein, 22 aa, Homo sapiens
VGQTAFDVADEDILGYLEELQK

SEQ ID NO: 14781 - protein, 11 aa, Homo sapiens
YETSSTSAGDR

SEQ ID NO: 14782 - protein, 18 aa, Homo sapiens
YETSSTSAGDRYDSLLGR

SEQ ID NO: 14783 - protein, 14 aa, Homo sapiens
LGFTQGDVGLAMGK

SEQ ID NO: 14784 - protein, 18 aa, Homo sapiens
TIAATPIQTLPQSQSTPK

SEQ ID NO: 14785 - protein, 13 aa, Homo sapiens
LYGNDFSQTTISR

SEQ ID NO: 14786 - protein, 30 aa, Homo sapiens
WLNDAENLSSDSSLSSPSALNSPGIEGLSR

SEQ ID NO: 14787 - protein, 16 aa, Homo sapiens
MADFHKEEMDDQDKDK

SEQ ID NO: 14788 - protein, 14 aa, Homo sapiens
YYLHDDREGEGSDK

SEQ ID NO: 14789 - protein, 7 aa, Homo sapiens
LRDDFEK

SEQ ID NO: 14790 - protein, 9 aa, Homo sapiens
ESEFDDEPK

SEQ ID NO: 14791 - protein, 8 aa, Homo sapiens
TDSEKPFR

SEQ ID NO: 14792 - protein, 17 aa, Homo sapiens
DSRPSQAAGDNQGDEAK

SEQ ID NO: 14793 - protein, 12 aa, Homo sapiens
GSFSDTGLGDGK

SEQ ID NO: 14794 - protein, 13 aa, Homo sapiens
KTEELEEESFPER

SEQ ID NO: 14795 - protein, 13 aa, Homo sapiens
NREEEWDPEYTPK

SEQ ID NO: 14796 - protein, 18 aa, Homo sapiens
SPSELFAQHIVTIVHHVK

SEQ ID NO: 14797 - protein, 9 aa, Homo sapiens
YKDDPVDLR

SEQ ID NO: 14798 - protein, 20 aa, Homo sapiens
ASESSKPWPDATYGTGSASR

SEQ ID NO: 14799 - protein, 13 aa, Homo sapiens
EESAASGGAAYTK

SEQ ID NO: 14800 - protein, 11 aa, Homo sapiens
EEEWDPEYTPK

SEQ ID NO: 14801 - protein, 14 aa, Homo sapiens
SPPSTGSTYGSSQK

SEQ ID NO: 14802 - protein, 11 aa, Homo sapiens
WEGLVYAPPGK

SEQ ID NO: 14803 - protein, 13 aa, Homo sapiens
EQTFSGGTSQDTK

SEQ ID NO: 14804 - protein, 10 aa, Homo sapiens
ASAVSELSPR

SEQ ID NO: 14805 - protein, 14 aa, Homo sapiens
EHHFGSSGMTLHER

SEQ ID NO: 14806 - protein, 10 aa, Homo sapiens
MDSFDEDLAR

SEQ ID NO: 14807 - protein, 19 aa, Homo sapiens
MDSFDEDLARPSGLLAQER

SEQ ID NO: 14808 - protein, 9 aa, Homo sapiens
PSGLLAQER

SEQ ID NO: 14809 - protein, 13 aa, Homo sapiens
SIFQHIQSAQSQR

SEQ ID NO: 14810 - protein, 9 aa, Homo sapiens
SPLQSVVVR

SEQ ID NO: 14811 - protein, 7 aa, Homo sapiens
YYLHDDR

SEQ ID NO: 14812 - protein, 14 aa, Homo sapiens
LTEDGLPLGVNLGK

SEQ ID NO: 14813 - protein, 9 aa, Homo sapiens
VHRPAVLVK

SEQ ID NO: 14814 - protein, 11 aa, Homo sapiens
NPVGIAAGFDK

SEQ ID NO: 14815 - protein, 18 aa, Homo sapiens
VPIIGVGGVSSGQDALEK

SEQ ID NO: 14816 - protein, 10 aa, Homo sapiens
HGEAVDGLYK

SEQ ID NO: 14817 - protein, 8 aa, Homo sapiens
DLSTQTIR

SEQ ID NO: 14818 - protein, 10 aa, Homo sapiens
FQDSDMLEVR

SEQ ID NO: 14819 - protein, 9 aa, Homo sapiens
FTSLGLLPR

SEQ ID NO: 14820 - protein, 21 aa, Homo sapiens
FYAEHLMPTLQGLLDPESAHR

SEQ ID NO: 14821 - protein, 9 aa, Homo sapiens
PAGLQGALR

SEQ ID NO: 14822 - protein, 14 aa, Homo sapiens
TSVDAAEDYAEGVR

SEQ ID NO: 14823 - protein, 22 aa, Homo sapiens
VLGPLADYLVVNVSSPNTAGLR

SEQ ID NO: 14824 - protein, 14 aa, Homo sapiens
YGFNSHGLSVVEHR

SEQ ID NO: 14825 - protein, 7 aa, Homo sapiens
KLDTYLQ

SEQ ID NO: 14826 - protein, 11 aa, Homo sapiens
VKPWNYTYDPK

SEQ ID NO: 14827 - protein, 16 aa, Homo sapiens
TDQAFVTLTTNDAYAK

SEQ ID NO: 14828 - protein, 10 aa, Homo sapiens
GALVLGSSLK

SEQ ID NO: 14829 - protein, 10 aa, Homo sapiens
RPELGVTLTK

SEQ ID NO: 14830 - protein, 18 aa, Homo sapiens
WEQGQADYMGADSFDNIK

SEQ ID NO: 14831 - protein, 19 aa, Homo sapiens
WEQGQADYMGADSFDNIKR

SEQ ID NO: 14832 - protein, 11 aa, Homo sapiens
LHCWSLTQYSK

SEQ ID NO: 14833 - protein, 14 aa, Homo sapiens
LVVLATPQVSDSMR

SEQ ID NO: 14834 - protein, 15 aa, Homo sapiens
RLVVLATPQVSDSMR

SEQ ID NO: 14835 - protein, 7 aa, Homo sapiens
VVHFLGR

SEQ ID NO: 14836 - protein, 9 aa, Homo sapiens
VTLDWAKPK

SEQ ID NO: 14837 - protein, 21 aa, Homo sapiens
EAMEDGEIDGNKVTLDWAKPK

SEQ ID NO: 14838 - protein, 7 aa, Homo sapiens
TEADAEK

SEQ ID NO: 14839 - protein, 9 aa, Homo sapiens
KVAVATPAK

SEQ ID NO: 14840 - protein, 14 aa, Homo sapiens
GYAFIEFASFEDAK

SEQ ID NO: 14841 - protein, 11 aa, Homo sapiens
IVTDRETGSSK

SEQ ID NO: 14842 - protein, 9 aa, Homo sapiens
VAVATPAKK

SEQ ID NO: 14843 - protein, 9 aa, Homo sapiens
ALVATPGKK

SEQ ID NO: 14844 - protein, 12 aa, Homo sapiens
TEADAEKTFEEK

SEQ ID NO: 14845 - protein, 15 aa, Homo sapiens
KFGYVDFESAEDLEK

SEQ ID NO: 14846 - protein, 23 aa, Homo sapiens
QKVEGTEPTTAFNLFVGNLNFNK

SEQ ID NO: 14847 - protein, 10 aa, Homo sapiens
SISLYYTGEK

SEQ ID NO: 14848 - protein, 14 aa, Homo sapiens
GFGFVDFNSEEDAK

SEQ ID NO: 14849 - protein, 20 aa, Homo sapiens
GLSEDTTEETLKESFDGSVR

SEQ ID NO: 14850 - protein, 8 aa, Homo sapiens
GIAYIEFK

SEQ ID NO: 14851 - protein, 8 aa, Homo sapiens
ALELTGLK

SEQ ID NO: 14852 - protein, 12 aa, Homo sapiens
EAMEDGEIDGNK

SEQ ID NO: 14853 - protein, 8 aa, Homo sapiens
VAVATPAK

SEQ ID NO: 14854 - protein, 12 aa, Homo sapiens
GLSEDTTEETLK

SEQ ID NO: 14855 - protein, 9 aa, Homo sapiens
TGISDVFAK

SEQ ID NO: 14856 - protein, 17 aa, Homo sapiens
VTQDELKEVFEDAAEIR

SEQ ID NO: 14857 - protein, 7 aa, Homo sapiens
VFGNEIK

SEQ ID NO: 14858 - protein, 8 aa, Homo sapiens
ALVATPGK

SEQ ID NO: 14859 - protein, 7 aa, Homo sapiens
VTQDELK

SEQ ID NO: 14860 - protein, 7 aa, Homo sapiens
VVVSPTK

SEQ ID NO: 14861 - protein, 22 aa, Homo sapiens
TLVLSNLSYSATEETLQEVFEK

SEQ ID NO: 14862 - protein, 21 aa, Homo sapiens
VEGTEPTTAFNLFVGNLNFNK

SEQ ID NO: 14863 - protein, 14 aa, Homo sapiens
FGYVDFESAEDLEK

SEQ ID NO: 14864 - protein, 19 aa, Homo sapiens
EAMEDGEIDGNKVTLDWAK

SEQ ID NO: 14865 - protein, 8 aa, Homo sapiens
ESFDGSVR

SEQ ID NO: 14866 - protein, 10 aa, Homo sapiens
EVFEDAAEIR

SEQ ID NO: 14867 - protein, 7 aa, Homo sapiens
GQNQDYR

SEQ ID NO: 14868 - protein, 7 aa, Homo sapiens
LELQGPR

SEQ ID NO: 14869 - protein, 9 aa, Homo sapiens
NDLAVVDVR

SEQ ID NO: 14870 - protein, 8 aa, Homo sapiens
QGTEIDGR

SEQ ID NO: 14871 - protein, 14 aa, Homo sapiens
SSSQVPPILQETDK

SEQ ID NO: 14872 - protein, 12 aa, Homo sapiens
EIREDLPVNTSK

SEQ ID NO: 14873 - protein, 20 aa, Homo sapiens
KREEAAAVPAAAPDDLALLK

SEQ ID NO: 14874 - protein, 11 aa, Homo sapiens
LSSQISAGEEK

SEQ ID NO: 14875 - protein, 16 aa, Homo sapiens
QGEDNSTAQDTEELEK

SEQ ID NO: 14876 - protein, 15 aa, Homo sapiens
NKGDSHLNVQVSNFK

SEQ ID NO: 14877 - protein, 16 aa, Homo sapiens
TLPPATSTEPSVILSK

SEQ ID NO: 14878 - protein, 13 aa, Homo sapiens
TISTSDPAEVLVK

SEQ ID NO: 14879 - protein, 12 aa, Homo sapiens
TELGLDLGLEPK

SEQ ID NO: 14880 - protein, 18 aa, Homo sapiens
EEAAAVPAAAPDDLALLK

SEQ ID NO: 14881 - protein, 11 aa, Homo sapiens
EMLSVGLGFLR

SEQ ID NO: 14882 - protein, 16 aa, Homo sapiens
SWQDELAQQAEEGSAR

SEQ ID NO: 14883 - protein, 11 aa, Homo sapiens
TVEVAEGEAVR

SEQ ID NO: 14884 - protein, 16 aa, Homo sapiens
FDTQLFHTIGVEFLNK

SEQ ID NO: 14885 - protein, 14 aa, Homo sapiens
SDHLIQTDTVNLHR

SEQ ID NO: 14886 - protein, 16 aa, Homo sapiens
NDTKEDVFVHQTAIKK

SEQ ID NO: 14887 - protein, 27 aa, Homo sapiens
PGTTGSGAGSGGPGGLTSAAPAGGDKK

SEQ ID NO: 14888 - protein, 15 aa, Homo sapiens
NDTKEDVFVHQTAIK

SEQ ID NO: 14889 - protein, 17 aa, Homo sapiens
SVGDGETVEFDVVEGEK

SEQ ID NO: 14890 - protein, 29 aa, Homo sapiens
NYQQNYQNSESGEKNEGSESAPEGQAQQR

SEQ ID NO: 14891 - protein, 19 aa, Homo sapiens
GAEAANVTGPGGVPVQGSK

SEQ ID NO: 14892 - protein, 20 aa, Homo sapiens
AADPPAENSSAPEAEQGGAE

SEQ ID NO: 14893 - protein, 11 aa, Homo sapiens
EDVFVHQTAIK

SEQ ID NO: 14894 - protein, 7 aa, Homo sapiens
FPPYYMR

SEQ ID NO: 14895 - protein, 15 aa, Homo sapiens
NEGSESAPEGQAQQR

SEQ ID NO: 14896 - protein, 8 aa, Homo sapiens
NGYGFINR

SEQ ID NO: 14897 - protein, 14 aa, Homo sapiens
NYQQNYQNSESGEK

SEQ ID NO: 14898 - protein, 30 aa, Homo sapiens
RPQYSNPPVQGEVMEGADNQGAGEQGRPVR

SEQ ID NO: 14899 - protein, 12 aa, Homo sapiens
AQEALSHTEQSK

SEQ ID NO: 14900 - protein, 9 aa, Homo sapiens
ALVDNEQLR

SEQ ID NO: 14901 - protein, 8 aa, Homo sapiens
DALSGAVR

SEQ ID NO: 14902 - protein, 20 aa, Homo sapiens
CLNALEELGTLQVTSQILQK

SEQ ID NO: 14903 - protein, 13 aa, Homo sapiens
PHAFKPGDLVFAK

SEQ ID NO: 14904 - protein, 8 aa, Homo sapiens
VDSPDVKR

SEQ ID NO: 14905 - protein, 9 aa, Homo sapiens
NTDVVATLK

SEQ ID NO: 14906 - protein, 15 aa, Homo sapiens
IDDIADGAVKPPPNK

SEQ ID NO: 14907 - protein, 15 aa, Homo sapiens
LAGEELAGEEAPQEK

SEQ ID NO: 14908 - protein, 20 aa, Homo sapiens
GESAEDKEHEEGRDSEEGPR

SEQ ID NO: 14909 - protein, 8 aa, Homo sapiens
SEGFSMDR

SEQ ID NO: 14910 - protein, 18 aa, Homo sapiens
FLSQPFQVAEVFTGHMGK

SEQ ID NO: 14911 - protein, 20 aa, Homo sapiens
TREGNDLYHEMIESGVINLK

SEQ ID NO: 14912 - protein, 13 aa, Homo sapiens
TVLIMELINNVAK

SEQ ID NO: 14913 - protein, 10 aa, Homo sapiens
VVDLLAPYAK

SEQ ID NO: 14914 - protein, 19 aa, Homo sapiens
VLDSGAPIKIPVGPETLGR

SEQ ID NO: 14915 - protein, 9 aa, Homo sapiens
VLDSGAPIK

SEQ ID NO: 14916 - protein, 9 aa, Homo sapiens
LVPLKETIK

SEQ ID NO: 14917 - protein, 18 aa, Homo sapiens
EGNDLYHEMIESGVINLK

SEQ ID NO: 14918 - protein, 11 aa, Homo sapiens
IGLFGGAGVGK

SEQ ID NO: 14919 - protein, 14 aa, Homo sapiens
AHGGYSVFAGVGER

SEQ ID NO: 14920 - protein, 19 aa, Homo sapiens
AIAELGIYPAVDPLDSTSR

SEQ ID NO: 14921 - protein, 16 aa, Homo sapiens
DQEGQDVLLFIDNIFR

SEQ ID NO: 14922 - protein, 14 aa, Homo sapiens
FTQAGSEVSALLGR

SEQ ID NO: 14923 - protein, 16 aa, Homo sapiens
IMDPNIVGSEHYDVAR

SEQ ID NO: 14924 - protein, 12 aa, Homo sapiens
IMNVIGEPIDER

SEQ ID NO: 14925 - protein, 21 aa, Homo sapiens
IPSAVGYQPTLATDMGTMQER

SEQ ID NO: 14926 - protein, 10 aa, Homo sapiens
IPVGPETLGR

SEQ ID NO: 14927 - protein, 15 aa, Homo sapiens
LVLEVAQHLGESTVR

SEQ ID NO: 14928 - protein, 19 aa, Homo sapiens
SLQDIIAILGMDELSEEDK

SEQ ID NO: 14929 - protein, 24 aa, Homo sapiens
SLQDIIAILGMDELSEEDKLTVSR

SEQ ID NO: 14930 - protein, 12 aa, Homo sapiens
TIAMDGTEGLVR

SEQ ID NO: 14931 - protein, 13 aa, Homo sapiens
VALTGLTVAEYFR

SEQ ID NO: 14932 - protein, 15 aa, Homo sapiens
VALVYGQMNEPPGAR

SEQ ID NO: 14933 - protein, 16 aa, Homo sapiens
AVDPDGDGHVSWDEYK

SEQ ID NO: 14934 - protein, 12 aa, Homo sapiens
DLGGFDEDAEPR

SEQ ID NO: 14935 - protein, 9 aa, Homo sapiens
LEMDGHLNR

SEQ ID NO: 14936 - protein, 14 aa, Homo sapiens
VELAPLPSWQPVGK

SEQ ID NO: 14937 - protein, 17 aa, Homo sapiens
EPAVGEPAEVTTTVLVR

SEQ ID NO: 14938 - protein, 12 aa, Homo sapiens
SEANDAVNSSTK

SEQ ID NO: 14939 - protein, 11 aa, Homo sapiens
GQTQEEEVRPK

SEQ ID NO: 14940 - protein, 15 aa, Homo sapiens
AGFRPVEAGGQHGGR

SEQ ID NO: 14941 - protein, 16 aa, Homo sapiens
AEDGATPSPSNETPKK

SEQ ID NO: 14942 - protein, 11 aa, Homo sapiens
AAEEPSKVEEK

SEQ ID NO: 14943 - protein, 19 aa, Homo sapiens
GEAAAERPGEAAVASSPSK

SEQ ID NO: 14944 - protein, 18 aa, Homo sapiens
GEPAAAAAPEAGASPVEK

SEQ ID NO: 14945 - protein, 32 aa, Homo sapiens
EAPAEGEAAEPGSPTAAEGEAASAASSTSSPK

SEQ ID NO: 14946 - protein, 15 aa, Homo sapiens
AEDGATPSPSNETPK

SEQ ID NO: 14947 - protein, 7 aa, Homo sapiens
LSGFSFK

SEQ ID NO: 14948 - protein, 17 aa, Homo sapiens
EAGEGGEAEAPAAEGGK

SEQ ID NO: 14949 - protein, 9 aa, Homo sapiens
IDLAVLLGK

SEQ ID NO: 14950 - protein, 8 aa, Homo sapiens
QLIDITGK

SEQ ID NO: 14951 - protein, 12 aa, Homo sapiens
RYPSSISSSPQK

SEQ ID NO: 14952 - protein, 15 aa, Homo sapiens
GNWEQPQNQNQTQHK

SEQ ID NO: 14953 - protein, 30 aa, Homo sapiens
TPSTMENDSSNLDPSQAPSLAQPLVFSNSK

SEQ ID NO: 14954 - protein, 16 aa, Homo sapiens
LAQMISDHNDADFEEK

SEQ ID NO: 14955 - protein, 20 aa, Homo sapiens
AINVLLEGNPDTHSWEMVGK

SEQ ID NO: 14956 - protein, 17 aa, Homo sapiens
QAFTPSSTMMEVFLQEK

SEQ ID NO: 14957 - protein, 13 aa, Homo sapiens
NPSDSAVHSPFTK

SEQ ID NO: 14958 - protein, 14 aa, Homo sapiens
SQTSSIPQKPQTNK

SEQ ID NO: 14959 - protein, 15 aa, Homo sapiens
DGSLASNPYSGDLTK

SEQ ID NO: 14960 - protein, 14 aa, Homo sapiens
GGSTTGSQFLEQFK

SEQ ID NO: 14961 - protein, 19 aa, Homo sapiens
TATEEWGTEDWNEDLSETK

SEQ ID NO: 14962 - protein, 25 aa, Homo sapiens
STSAPQMSPGSSDNQSSSPQPAQQK

SEQ ID NO: 14963 - protein, 21 aa, Homo sapiens
SPAVATSTAAPPPPSSPLPSK

SEQ ID NO: 14964 - protein, 24 aa, Homo sapiens
QTAISQPASGNTFSHHSMVSMLGK

SEQ ID NO: 14965 - protein, 20 aa, Homo sapiens
FPLDYYSIPFPTPTTPLTGR

SEQ ID NO: 14966 - protein, 24 aa, Homo sapiens
IFTASNVSSVPLPAENVTITAGQR

SEQ ID NO: 14967 - protein, 18 aa, Homo sapiens
NQDECVIALHDCNGDVNR

SEQ ID NO: 14968 - protein, 11 aa, Homo sapiens
QRPQATAEQIR

SEQ ID NO: 14969 - protein, 8 aa, Homo sapiens
LLNKPGLK

SEQ ID NO: 14970 - protein, 9 aa, Homo sapiens
EGETIIELK

SEQ ID NO: 14971 - protein, 8 aa, Homo sapiens
IEVSQLLK

SEQ ID NO: 14972 - protein, 11 aa, Homo sapiens
STVPTDFSSAK

SEQ ID NO: 14973 - protein, 27 aa, Homo sapiens
TKPQDMISAGGESVAGITAISGKPGDK

SEQ ID NO: 14974 - protein, 10 aa, Homo sapiens
DKDGKPLLPK

SEQ ID NO: 14975 - protein, 18 aa, Homo sapiens
SLTPAVPVESKPDKPSGK

SEQ ID NO: 14976 - protein, 15 aa, Homo sapiens
DTSQSDKDLDDALDK

SEQ ID NO: 14977 - protein, 13 aa, Homo sapiens
EADPEDGKPVMDK

SEQ ID NO: 14978 - protein, 23 aa, Homo sapiens
DTSQSDKDLDDALDKLSDSLGQR

SEQ ID NO: 14979 - protein, 12 aa, Homo sapiens
SQPGQKPAASPR

SEQ ID NO: 14980 - protein, 29 aa, Homo sapiens
EQLPPMSEDFLLDALSEDFSGPQNASSLK

SEQ ID NO: 14981 - protein, 17 aa, Homo sapiens
TSMCSIQSAPPEPATLK

SEQ ID NO: 14982 - protein, 10 aa, Homo sapiens
SSSMNPTETK

SEQ ID NO: 14983 - protein, 17 aa, Homo sapiens
GTVPDDAVEALADSLGK

SEQ ID NO: 14984 - protein, 13 aa, Homo sapiens
AAAPAPVSEAVCR

SEQ ID NO: 14985 - protein, 13 aa, Homo sapiens
CGEDDETIPSEYR

SEQ ID NO: 14986 - protein, 18 aa, Homo sapiens
DTMSDQALEALSASLGTR

SEQ ID NO: 14987 - protein, 24 aa, Homo sapiens
LAAAISEVVSQTPASTTQAGAPPR

SEQ ID NO: 14988 - protein, 8 aa, Homo sapiens
LSDSLGQR

SEQ ID NO: 14989 - protein, 15 aa, Homo sapiens
SESELIDELSEDFDR

SEQ ID NO: 14990 - protein, 13 aa, Homo sapiens
RPRPPNAPSQDGK

SEQ ID NO: 14991 - protein, 26 aa, Homo sapiens
PAPAVGEAEDKENQQATSGPNQPSVR

SEQ ID NO: 14992 - protein, 15 aa, Homo sapiens
DGVPEGAQLQGPVHR

SEQ ID NO: 14993 - protein, 19 aa, Homo sapiens
GAEAANVTGPDGVPVEGSR

SEQ ID NO: 14994 - protein, 7 aa, Homo sapiens
VLPHPNR

SEQ ID NO: 14995 - protein, 33 aa, Homo sapiens
SNLDPSNVDSLFYAAQASQALSGCEISISNETK

SEQ ID NO: 14996 - protein, 13 aa, Homo sapiens
NPILWNVADVVIK

SEQ ID NO: 14997 - protein, 19 aa, Homo sapiens
FPEEEAPSTVLSQNLFTPK

SEQ ID NO: 14998 - protein, 24 aa, Homo sapiens
ISTEVGITNVDLSTVDKDQSIAPK

SEQ ID NO: 14999 - protein, 14 aa, Homo sapiens
TGQEVVFVAEPDNK

SEQ ID NO: 15000 - protein, 27 aa, Homo sapiens
LSKEETVLATVQALQTASHLSQQADLR

SEQ ID NO: 15001 - protein, 17 aa, Homo sapiens
LQVTNVLSQPLTQATVK

SEQ ID NO: 15002 - protein, 23 aa, Homo sapiens
KNFESLSEAFSVASAAAVLSHNR

SEQ ID NO: 15003 - protein, 18 aa, Homo sapiens
TSFTPVGDVFELNFMNVK

SEQ ID NO: 15004 - protein, 24 aa, Homo sapiens
EETVLATVQALQTASHLSQQADLR

SEQ ID NO: 15005 - protein, 8 aa, Homo sapiens
FELDTSER

SEQ ID NO: 15006 - protein, 17 aa, Homo sapiens
FSSGYYDFLVEVEGDNR

SEQ ID NO: 15007 - protein, 22 aa, Homo sapiens
NFESLSEAFSVASAAAVLSHNR

SEQ ID NO: 15008 - protein, 12 aa, Homo sapiens
SIVEEIEDLVAR

SEQ ID NO: 15009 - protein, 23 aa, Homo sapiens
YHVPVVVVPEGSASDTHEQAILR

SEQ ID NO: 15010 - protein, 9 aa, Homo sapiens
YIANTVELR

SEQ ID NO: 15011 - protein, 14 aa, Homo sapiens
SFSNIISTLNPTAK

SEQ ID NO: 15012 - protein, 20 aa, Homo sapiens
VFVGATDSAVPCAMMLELAR

SEQ ID NO: 15013 - protein, 11 aa, Homo sapiens
YPGSPGSYAAR

SEQ ID NO: 15014 - protein, 15 aa, Homo sapiens
ATATISAKPQITNPK

SEQ ID NO: 15015 - protein, 21 aa, Homo sapiens
DMEKLDEMEFNPVQQPQLNEK

SEQ ID NO: 15016 - protein, 12 aa, Homo sapiens
KSEDDSAVPLAK

SEQ ID NO: 15017 - protein, 9 aa, Homo sapiens
KLEVEYEQK

SEQ ID NO: 15018 - protein, 20 aa, Homo sapiens
KPPGPPPGPPPPQVVQMYGR

SEQ ID NO: 15019 - protein, 7 aa, Homo sapiens
FADMPGK

SEQ ID NO: 15020 - protein, 11 aa, Homo sapiens
AQLSQYFDAVK

SEQ ID NO: 15021 - protein, 11 aa, Homo sapiens
SEDDSAVPLAK

SEQ ID NO: 15022 - protein, 12 aa, Homo sapiens
SGPSVPVSVQTK

SEQ ID NO: 15023 - protein, 11 aa, Homo sapiens
ADDTSAATIEK

SEQ ID NO: 15024 - protein, 14 aa, Homo sapiens
AVSILPLLGHGVPR

SEQ ID NO: 15025 - protein, 13 aa, Homo sapiens
DEDMLYSPELAQR

SEQ ID NO: 15026 - protein, 11 aa, Homo sapiens
ELTPLQAMMLR

SEQ ID NO: 15027 - protein, 9 aa, Homo sapiens
FMNPTDQAR

SEQ ID NO: 15028 - protein, 15 aa, Homo sapiens
RRDEDMLYSPELAQR

SEQ ID NO: 15029 - protein, 9 aa, Homo sapiens
TSAYGPPTR

SEQ ID NO: 15030 - protein, 11 aa, Homo sapiens
EVVVAESELQK

SEQ ID NO: 15031 - protein, 10 aa, Homo sapiens
AVTGWLESLR

SEQ ID NO: 15032 - protein, 8 aa, Homo sapiens
FSIPDLDR

SEQ ID NO: 15033 - protein, 12 aa, Homo sapiens
DENKVDGMNAPK

SEQ ID NO: 15034 - protein, 17 aa, Homo sapiens
SQSSDTEQQSPTSGGGK

SEQ ID NO: 15035 - protein, 14 aa, Homo sapiens
VAPAQPSEEGPGRK

SEQ ID NO: 15036 - protein, 16 aa, Homo sapiens
AASIFGGAKPVDTAAR

SEQ ID NO: 15037 - protein, 17 aa, Homo sapiens
STPKEDDSSASTSQSTR

SEQ ID NO: 15038 - protein, 21 aa, Homo sapiens
SPPYTAFLGNLPYDVTEESIK

SEQ ID NO: 15039 - protein, 23 aa, Homo sapiens
TISLTDFLAEDGGTGGGSTYVSK

SEQ ID NO: 15040 - protein, 8 aa, Homo sapiens
VMPAPPPK

SEQ ID NO: 15041 - protein, 10 aa, Homo sapiens
DSDKTDTDWR

SEQ ID NO: 15042 - protein, 11 aa, Homo sapiens
RGDDSFGDKYR

SEQ ID NO: 15043 - protein, 15 aa, Homo sapiens
VDVADQAQDKDRDDR

SEQ ID NO: 15044 - protein, 7 aa, Homo sapiens
AFGSGYR

SEQ ID NO: 15045 - protein, 14 aa, Homo sapiens
ARPATDSFDDYPPR

SEQ ID NO: 15046 - protein, 8 aa, Homo sapiens
GLNISAVR

SEQ ID NO: 15047 - protein, 28 aa, Homo sapiens
PVSWADETDDLEGDVSTTWHSNDDDVYR

SEQ ID NO: 15048 - protein, 16 aa, Homo sapiens
TGSESSQTGTSTTSSR

SEQ ID NO: 15049 - protein, 13 aa, Homo sapiens
VAPAQPSEEGPGR

SEQ ID NO: 15050 - protein, 8 aa, Homo sapiens
ITQVTWQK

SEQ ID NO: 15051 - protein, 11 aa, Homo sapiens
LKGEAEYQEIR

SEQ ID NO: 15052 - protein, 22 aa, Homo sapiens
GPINYSLAGTYICEATNPIGTR

SEQ ID NO: 15053 - protein, 13 aa, Homo sapiens
PTNWIEGTQAVLR

SEQ ID NO: 15054 - protein, 19 aa, Homo sapiens
QNVAIYNPSMGVSVLAPYR

SEQ ID NO: 15055 - protein, 12 aa, Homo sapiens
RPYFTVDEAEAR

SEQ ID NO: 15056 - protein, 14 aa, Homo sapiens
VEFLRPSFTDGTIR

SEQ ID NO: 15057 - protein, 9 aa, Homo sapiens
DVFERPSAK

SEQ ID NO: 15058 - protein, 13 aa, Homo sapiens
DFSAPTLEDHFNK

SEQ ID NO: 15059 - protein, 14 aa, Homo sapiens
GAFFMDEDEEVYKR

SEQ ID NO: 15060 - protein, 8 aa, Homo sapiens
ISEDVEER

SEQ ID NO: 15061 - protein, 14 aa, Homo sapiens
QPPIQSTAGAVPVR

SEQ ID NO: 15062 - protein, 12 aa, Homo sapiens
EAQLYAAQAHLK

SEQ ID NO: 15063 - protein, 8 aa, Homo sapiens
SIEVIENR

SEQ ID NO: 15064 - protein, 14 aa, Homo sapiens
REPEEHQVEEEHRK

SEQ ID NO: 15065 - protein, 12 aa, Homo sapiens
YSALNVQHQMLK

SEQ ID NO: 15066 - protein, 9 aa, Homo sapiens
LEAQETLNK

SEQ ID NO: 15067 - protein, 15 aa, Homo sapiens
DNQHQDEAEGDPGNR

SEQ ID NO: 15068 - protein, 19 aa, Homo sapiens
DNQHQDEAEGDPGNRHEPR

SEQ ID NO: 15069 - protein, 13 aa, Homo sapiens
FQSPYEEQLEQQR

SEQ ID NO: 15070 - protein, 13 aa, Homo sapiens
LAVQQVEEAQQLR

SEQ ID NO: 15071 - protein, 16 aa, Homo sapiens
QAELEEGRPQHQEQLR

SEQ ID NO: 15072 - protein, 11 aa, Homo sapiens
LIEYYQQLAQK

SEQ ID NO: 15073 - protein, 10 aa, Homo sapiens
APLSQLYFCR

SEQ ID NO: 15074 - protein, 17 aa, Homo sapiens
SVASGGWQEPENPHTQR

SEQ ID NO: 15075 - protein, 14 aa, Homo sapiens
IQSSHNFQLESVNK

SEQ ID NO: 15076 - protein, 14 aa, Homo sapiens
KFSYDLSQCINQMK

SEQ ID NO: 15077 - protein, 20 aa, Homo sapiens
DQLVIPDGQEEEQEAAGEGR

SEQ ID NO: 15078 - protein, 9 aa, Homo sapiens
DTINLLDQR

SEQ ID NO: 15079 - protein, 12 aa, Homo sapiens
EQVVEDRPVGGR

SEQ ID NO: 15080 - protein, 9 aa, Homo sapiens
LQEYNVGGK

SEQ ID NO: 15081 - protein, 13 aa, Homo sapiens
AGSSESIAAFIQR

SEQ ID NO: 15082 - protein, 31 aa, Homo sapiens
APPQTHLPSGASSGTGSASATHGGGSPPGTR

SEQ ID NO: 15083 - protein, 8 aa, Homo sapiens
DIQTLLSR

SEQ ID NO: 15084 - protein, 12 aa, Homo sapiens
DLEAPEVQESYR

SEQ ID NO: 15085 - protein, 17 aa, Homo sapiens
ENASPAPGTTAEEAMSR

SEQ ID NO: 15086 - protein, 16 aa, Homo sapiens
ESFSLVQVQPGVDIIR

SEQ ID NO: 15087 - protein, 17 aa, Homo sapiens
GVNPSLVSWLTTMMGLR

SEQ ID NO: 15088 - protein, 10 aa, Homo sapiens
LINLVGESLR

SEQ ID NO: 15089 - protein, 13 aa, Homo sapiens
LLGNTFVALSDLR

SEQ ID NO: 15090 - protein, 11 aa, Homo sapiens
LQEDPNYSPQR

SEQ ID NO: 15091 - protein, 17 aa, Homo sapiens
LQVVLEHMPVGPDAILR

SEQ ID NO: 15092 - protein, 9 aa, Homo sapiens
LVMAQHMIR

SEQ ID NO: 15093 - protein, 15 aa, Homo sapiens
MATHTLITGLEEYVR

SEQ ID NO: 15094 - protein, 10 aa, Homo sapiens
PLTSPESLSR

SEQ ID NO: 15095 - protein, 19 aa, Homo sapiens
SFFHQHYLGGQEPTPSNIR

SEQ ID NO: 15096 - protein, 17 aa, Homo sapiens
TMQGEGPQLLLSEAVSR

SEQ ID NO: 15097 - protein, 7 aa, Homo sapiens
VIHLVER

SEQ ID NO: 15098 - protein, 25 aa, Homo sapiens
YYEVLGAAATTDYNNNHEGREEDQR

SEQ ID NO: 15099 - protein, 15 aa, Homo sapiens
QGADTLAYIALLEEK

SEQ ID NO: 15100 - protein, 14 aa, Homo sapiens
TQPAVATAATAAEK

SEQ ID NO: 15101 - protein, 17 aa, Homo sapiens
DRGPMYDDPTLPEGWTR

SEQ ID NO: 15102 - protein, 18 aa, Homo sapiens
VGDTSLDPNDFDFTVTGR

SEQ ID NO: 15103 - protein, 18 aa, Homo sapiens
VAELEAQAASEVTPTGEK

SEQ ID NO: 15104 - protein, 21 aa, Homo sapiens
ANTVYGLGFASEQHLTQFAEK

SEQ ID NO: 15105 - protein, 19 aa, Homo sapiens
EGLGQGQSLEQLEALVQTK

SEQ ID NO: 15106 - protein, 14 aa, Homo sapiens
EALEAAEREETQQK

SEQ ID NO: 15107 - protein, 15 aa, Homo sapiens
AIINSTVTPNMTFTK

SEQ ID NO: 15108 - protein, 8 aa, Homo sapiens
DQEIQTLK

SEQ ID NO: 15109 - protein, 8 aa, Homo sapiens
EQPIFSTR

SEQ ID NO: 15110 - protein, 13 aa, Homo sapiens
HALTVSYFYDATR

SEQ ID NO: 15111 - protein, 9 aa, Homo sapiens
NAELEHQLR

SEQ ID NO: 15112 - protein, 12 aa, Homo sapiens
SQSADAPGPTER

SEQ ID NO: 15113 - protein, 7 aa, Homo sapiens
VQDLETR

SEQ ID NO: 15114 - protein, 13 aa, Homo sapiens
KPAPPPAPPQATK

SEQ ID NO: 15115 - protein, 15 aa, Homo sapiens
AGAEDDEEKGEGTPR

SEQ ID NO: 15116 - protein, 25 aa, Homo sapiens
SSQQPSTPQQAPPGQPQQGTFVAHK

SEQ ID NO: 15117 - protein, 8 aa, Homo sapiens
AVEDAIAR

SEQ ID NO: 15118 - protein, 18 aa, Homo sapiens
DTVLEPYADPYYDYEIER

SEQ ID NO: 15119 - protein, 20 aa, Homo sapiens
DVVTPLSTLLPPISNSIPFR

SEQ ID NO: 15120 - protein, 8 aa, Homo sapiens
GGQYENFR

SEQ ID NO: 15121 - protein, 13 aa, Homo sapiens
VQYTETEPYHNYR

SEQ ID NO: 15122 - protein, 14 aa, Homo sapiens
KETSGTQGIEGHLK

SEQ ID NO: 15123 - protein, 20 aa, Homo sapiens
GGTQEPAPVPAEPFDNTTYK

SEQ ID NO: 15124 - protein, 13 aa, Homo sapiens
GSPAPAVLAEEAR

SEQ ID NO: 15125 - protein, 9 aa, Homo sapiens
KTLVEFPQK

SEQ ID NO: 15126 - protein, 12 aa, Homo sapiens
GLGEISAASEFK

SEQ ID NO: 15127 - protein, 13 aa, Homo sapiens
LEGQMGEDGNSIK

SEQ ID NO: 15128 - protein, 11 aa, Homo sapiens
LPSGSDHVMLK

SEQ ID NO: 15129 - protein, 26 aa, Homo sapiens
DGEQIEQEEDDEKYIFSDDSSQLTIK

SEQ ID NO: 15130 - protein, 10 aa, Homo sapiens
AVGEEVWHSK

SEQ ID NO: 15131 - protein, 11 aa, Homo sapiens
AGEQDATIHLK

SEQ ID NO: 15132 - protein, 11 aa, Homo sapiens
DLIQDQNMDEK

SEQ ID NO: 15133 - protein, 12 aa, Homo sapiens
NEEQKAEQEEGK

SEQ ID NO: 15134 - protein, 10 aa, Homo sapiens
RIEFAEQINK

SEQ ID NO: 15135 - protein, 17 aa, Homo sapiens
LTEVPVEPVLTVHPESK

SEQ ID NO: 15136 - protein, 26 aa, Homo sapiens
HVIADQEVMETNRVESVEPSENEASK

SEQ ID NO: 15137 - protein, 16 aa, Homo sapiens
VELAQLQEEWNEHNAK

SEQ ID NO: 15138 - protein, 11 aa, Homo sapiens
TKPHLFYIPGR

SEQ ID NO: 15139 - protein, 11 aa, Homo sapiens
IFGLLMGTLQK

SEQ ID NO: 15140 - protein, 8 aa, Homo sapiens
TLQEQLEK

SEQ ID NO: 15141 - protein, 8 aa, Homo sapiens
DLEGAVSR

SEQ ID NO: 15142 - protein, 7 aa, Homo sapiens
LIEESQR

SEQ ID NO: 15143 - protein, 11 aa, Homo sapiens
LLALSGPGGGR

SEQ ID NO: 15144 - protein, 8 aa, Homo sapiens
MEEETEVR

SEQ ID NO: 15145 - protein, 8 aa, Homo sapiens
MNALFEGR

SEQ ID NO: 15146 - protein, 24 aa, Homo sapiens
VTEESHEEPAFQNFMQESMAQYWK

SEQ ID NO: 15147 - protein, 9 aa, Homo sapiens
LKDKWDELK

SEQ ID NO: 15148 - protein, 12 aa, Homo sapiens
CEDLETQTQSEK

SEQ ID NO: 15149 - protein, 13 aa, Homo sapiens
LASVPGSQTVVVK

SEQ ID NO: 15150 - protein, 11 aa, Homo sapiens
DDLDEEEDTHL

SEQ ID NO: 15151 - protein, 13 aa, Homo sapiens
LGDQGPPEEAEDR

SEQ ID NO: 15152 - protein, 7 aa, Homo sapiens
LISLICR

SEQ ID NO: 15153 - protein, 17 aa, Homo sapiens
WLPVQESSTDDKKPGER

SEQ ID NO: 15154 - protein, 12 aa, Homo sapiens
WLPVQESSTDDK

SEQ ID NO: 15155 - protein, 8 aa, Homo sapiens
LQELQEMK

SEQ ID NO: 15156 - protein, 15 aa, Homo sapiens
EALLGVQEDVDEYVK

SEQ ID NO: 15157 - protein, 16 aa, Homo sapiens
WDPTANEDPEWILVEK

SEQ ID NO: 15158 - protein, 24 aa, Homo sapiens
KLSEEEILENPDLFLTSEATDYGR

SEQ ID NO: 15159 - protein, 11 aa, Homo sapiens
AEELHYPLGER

SEQ ID NO: 15160 - protein, 23 aa, Homo sapiens
LSEEEILENPDLFLTSEATDYGR

SEQ ID NO: 15161 - protein, 28 aa, Homo sapiens
EEDAASTLVTGSEYETMLTEIMSMGYER

SEQ ID NO: 15162 - protein, 9 aa, Homo sapiens
ILSDDVPIR

SEQ ID NO: 15163 - protein, 17 aa, Homo sapiens
NENLAANFLLSQNFDDE

SEQ ID NO: 15164 - protein, 30 aa, Homo sapiens
QVIQQNPALLPALLQQLGQENPQLLQQISR

SEQ ID NO: 15165 - protein, 16 aa, Homo sapiens
DTFEHDPSESIDEFNK

SEQ ID NO: 15166 - protein, 16 aa, Homo sapiens
YFLHDDRDDGVDYWAK

SEQ ID NO: 15167 - protein, 14 aa, Homo sapiens
SSFYPDGGDQETAK

SEQ ID NO: 15168 - protein, 17 aa, Homo sapiens
MAPVPLDDSNRPASLTK

SEQ ID NO: 15169 - protein, 12 aa, Homo sapiens
MIASDSHRPEVK

SEQ ID NO: 15170 - protein, 7 aa, Homo sapiens
SIFDHIK

SEQ ID NO: 15171 - protein, 11 aa, Homo sapiens
LLASTLVHSVK

SEQ ID NO: 15172 - protein, 22 aa, Homo sapiens
SQEEPKDTFEHDPSESIDEFNK

SEQ ID NO: 15173 - protein, 15 aa, Homo sapiens
LKETGYVVERPSTTK

SEQ ID NO: 15174 - protein, 13 aa, Homo sapiens
ETGYVVERPSTTK

SEQ ID NO: 15175 - protein, 9 aa, Homo sapiens
SAAMTLNER

SEQ ID NO: 15176 - protein, 19 aa, Homo sapiens
NKPGPYSSVPPPSAPPPKK

SEQ ID NO: 15177 - protein, 26 aa, Homo sapiens
ASESSSSEESSDDDDEEDQKKQPVQK

SEQ ID NO: 15178 - protein, 18 aa, Homo sapiens
NKPGPYSSVPPPSAPPPK

SEQ ID NO: 15179 - protein, 14 aa, Homo sapiens
VAGGAAPSKPASAK

SEQ ID NO: 15180 - protein, 11 aa, Homo sapiens
SPAVKPAAAPK

SEQ ID NO: 15181 - protein, 9 aa, Homo sapiens
LQTPNTFPK

SEQ ID NO: 15182 - protein, 9 aa, Homo sapiens
VADNSFDAK

SEQ ID NO: 15183 - protein, 8 aa, Homo sapiens
AALSLPAK

SEQ ID NO: 15184 - protein, 10 aa, Homo sapiens
DNQLSEVANK

SEQ ID NO: 15185 - protein, 24 aa, Homo sapiens
ATGATQQDANASSLLDIYSFWLNR

SEQ ID NO: 15186 - protein, 9 aa, Homo sapiens
GAAGDWGER

SEQ ID NO: 15187 - protein, 7 aa, Homo sapiens
KQNEAAK

SEQ ID NO: 15188 - protein, 10 aa, Homo sapiens
RGAAGDWGER

SEQ ID NO: 15189 - protein, 11 aa, Homo sapiens
VREEEIEVDSR

SEQ ID NO: 15190 - protein, 15 aa, Homo sapiens
VVPSDLYPLVLGFLR

SEQ ID NO: 15191 - protein, 16 aa, Homo sapiens
GTFHDDRDDGVDYWAK

SEQ ID NO: 15192 - protein, 8 aa, Homo sapiens
NLQNVDMK

SEQ ID NO: 15193 - protein, 10 aa, Homo sapiens
SQEMVHLVNK

SEQ ID NO: 15194 - protein, 9 aa, Homo sapiens
FAGVFHVEK

SEQ ID NO: 15195 - protein, 8 aa, Homo sapiens
TEAADLCK

SEQ ID NO: 15196 - protein, 10 aa, Homo sapiens
ALSIGFETCR

SEQ ID NO: 15197 - protein, 16 aa, Homo sapiens
ESSETPDQFMTADETR

SEQ ID NO: 15198 - protein, 13 aa, Homo sapiens
LVINSGNGAVEDR

SEQ ID NO: 15199 - protein, 12 aa, Homo sapiens
YGFIEGHVVIPR

SEQ ID NO: 15200 - protein, 11 aa, Homo sapiens
LIQQGADAHSK

SEQ ID NO: 15201 - protein, 10 aa, Homo sapiens
EVEMMKAAYR

SEQ ID NO: 15202 - protein, 9 aa, Homo sapiens
SPVPVETLK

SEQ ID NO: 15203 - protein, 19 aa, Homo sapiens
ELTYQNTDLSEIKEEEQVK

SEQ ID NO: 15204 - protein, 10 aa, Homo sapiens
KSPVPVETLK

SEQ ID NO: 15205 - protein, 11 aa, Homo sapiens
EFTNQEAAEPK

SEQ ID NO: 15206 - protein, 12 aa, Homo sapiens
EIKDSLAEVEEK

SEQ ID NO: 15207 - protein, 19 aa, Homo sapiens
CMVEVPQELETSTGHSLEK

SEQ ID NO: 15208 - protein, 19 aa, Homo sapiens
DHNEEEGEETGLRDEKPIK

SEQ ID NO: 15209 - protein, 14 aa, Homo sapiens
HAHSILQFQFAEVK

SEQ ID NO: 15210 - protein, 11 aa, Homo sapiens
TNFMYQVDTLK

SEQ ID NO: 15211 - protein, 10 aa, Homo sapiens
MTKEELNALK

SEQ ID NO: 15212 - protein, 11 aa, Homo sapiens
EIDCLSPEAQK

SEQ ID NO: 15213 - protein, 12 aa, Homo sapiens
AGGEELDEGVAK

SEQ ID NO: 15214 - protein, 14 aa, Homo sapiens
SAVEAQNEVTENPK

SEQ ID NO: 15215 - protein, 13 aa, Homo sapiens
EVEERPEKDFTEK

SEQ ID NO: 15216 - protein, 12 aa, Homo sapiens
AMVSNAQLDNEK

SEQ ID NO: 15217 - protein, 12 aa, Homo sapiens
CEMSEHPSQTVR

SEQ ID NO: 15218 - protein, 24 aa, Homo sapiens
CTLPEHESPSQDISDACEAESTER

SEQ ID NO: 15219 - protein, 13 aa, Homo sapiens
DHNEEEGEETGLR

SEQ ID NO: 15220 - protein, 14 aa, Homo sapiens
DMLLELEEQLAESR

SEQ ID NO: 15221 - protein, 11 aa, Homo sapiens
EVPAHSTEVGR

SEQ ID NO: 15222 - protein, 19 aa, Homo sapiens
NMPGLSAATLASLGGTSSR

SEQ ID NO: 15223 - protein, 17 aa, Homo sapiens
TPETLLPFAEAEAFLKK

SEQ ID NO: 15224 - protein, 20 aa, Homo sapiens
EAVQKEEPIPQEPQWSLPSK

SEQ ID NO: 15225 - protein, 11 aa, Homo sapiens
ESPSAAGPEDK

SEQ ID NO: 15226 - protein, 23 aa, Homo sapiens
ESAAPASPAPSPAPSPTPAPPQK

SEQ ID NO: 15227 - protein, 14 aa, Homo sapiens
AELGAGAPPAVVAR

SEQ ID NO: 15228 - protein, 11 aa, Homo sapiens
LMTPTLSFLAR

SEQ ID NO: 15229 - protein, 16 aa, Homo sapiens
QLPLEPESPSGQVGPR

SEQ ID NO: 15230 - protein, 14 aa, Homo sapiens
SASASPLTPCSVTR

SEQ ID NO: 15231 - protein, 14 aa, Homo sapiens
SLQLSAWESSIVDR

SEQ ID NO: 15232 - protein, 16 aa, Homo sapiens
TPETLLPFAEAEAFLK

SEQ ID NO: 15233 - protein, 7 aa, Homo sapiens
VYYDPNK

SEQ ID NO: 15234 - protein, 12 aa, Homo sapiens
TFDLEAMFEQTR

SEQ ID NO: 15235 - protein, 8 aa, Homo sapiens
AFSVNIFK

SEQ ID NO: 15236 - protein, 11 aa, Homo sapiens
ALQATVGNSYK

SEQ ID NO: 15237 - protein, 7 aa, Homo sapiens
VWVQAFK

SEQ ID NO: 15238 - protein, 16 aa, Homo sapiens
FFLQGIQLNTILPDAR

SEQ ID NO: 15239 - protein, 8 aa, Homo sapiens
SHAGYQTI

SEQ ID NO: 15240 - protein, 9 aa, Homo sapiens
TVESITDIR

SEQ ID NO: 15241 - protein, 14 aa, Homo sapiens
ATAAFSNVGTAISK

SEQ ID NO: 15242 - protein, 13 aa, Homo sapiens
KKDEGSYSLEEPK

SEQ ID NO: 15243 - protein, 20 aa, Homo sapiens
NQSPVDQGATGASQGLLDRK

SEQ ID NO: 15244 - protein, 12 aa, Homo sapiens
KDEGSYSLEEPK

SEQ ID NO: 15245 - protein, 11 aa, Homo sapiens
DEGSYSLEEPK

SEQ ID NO: 15246 - protein, 17 aa, Homo sapiens
EGEAVVLPEVEPGLTAR

SEQ ID NO: 15247 - protein, 19 aa, Homo sapiens
NQSPVDQGATGASQGLLDR

SEQ ID NO: 15248 - protein, 14 aa, Homo sapiens
SLRPDPNFDALISK

SEQ ID NO: 15249 - protein, 10 aa, Homo sapiens
PMELYYAPTK

SEQ ID NO: 15250 - protein, 7 aa, Homo sapiens
LALEELR

SEQ ID NO: 15251 - protein, 11 aa, Homo sapiens
TWELSLYELQR

SEQ ID NO: 15252 - protein, 14 aa, Homo sapiens
TPAQSTHSEAPPSK

SEQ ID NO: 15253 - protein, 9 aa, Homo sapiens
IALETSLSK

SEQ ID NO: 15254 - protein, 9 aa, Homo sapiens
CQVEDGSPR

SEQ ID NO: 15255 - protein, 10 aa, Homo sapiens
DDHGAPFSCR

SEQ ID NO: 15256 - protein, 8 aa, Homo sapiens
GNPYPELR

SEQ ID NO: 15257 - protein, 18 aa, Homo sapiens
QPAVEEPAEVTATVLASR

SEQ ID NO: 15258 - protein, 10 aa, Homo sapiens
TFVLPVTPPR

SEQ ID NO: 15259 - protein, 9 aa, Homo sapiens
TSLTVVLLR

SEQ ID NO: 15260 - protein, 7 aa, Homo sapiens
WEEELSR

SEQ ID NO: 15261 - protein, 9 aa, Homo sapiens
LKGVGDSFK

SEQ ID NO: 15262 - protein, 19 aa, Homo sapiens
VIPPAGQTEDAEPISEPEK

SEQ ID NO: 15263 - protein, 13 aa, Homo sapiens
TKEAGMQPQLQIR

SEQ ID NO: 15264 - protein, 19 aa, Homo sapiens
LIPEMDQIFTEVEMTTLEK

SEQ ID NO: 15265 - protein, 7 aa, Homo sapiens
KVITFNR

SEQ ID NO: 15266 - protein, 16 aa, Homo sapiens
VAIVKPGVPMEIVLNK

SEQ ID NO: 15267 - protein, 8 aa, Homo sapiens
EVQYLLNK

SEQ ID NO: 15268 - protein, 21 aa, Homo sapiens
LSAASTWLEDEGVGATTVMLK

SEQ ID NO: 15269 - protein, 11 aa, Homo sapiens
PGVPMEIVLNK

SEQ ID NO: 15270 - protein, 17 aa, Homo sapiens
AEAGPEGVAPAPEGEKK

SEQ ID NO: 15271 - protein, 23 aa, Homo sapiens
TVLSANADHMAQIEGLMDDVDFK

SEQ ID NO: 15272 - protein, 9 aa, Homo sapiens
KLCQGLFFR

SEQ ID NO: 15273 - protein, 8 aa, Homo sapiens
KYPDYESK

SEQ ID NO: 15274 - protein, 12 aa, Homo sapiens
FFGDSAASMAIK

SEQ ID NO: 15275 - protein, 21 aa, Homo sapiens
NINADEAAAMGAVYQAAALSK

SEQ ID NO: 15276 - protein, 12 aa, Homo sapiens
LPATEKPVLLSK

SEQ ID NO: 15277 - protein, 29 aa, Homo sapiens
DEPGEQVELKEEAEAPVEDGSQPPPPEPK

SEQ ID NO: 15278 - protein, 9 aa, Homo sapiens
KTPVIVTLK

SEQ ID NO: 15279 - protein, 12 aa, Homo sapiens
SLAEDFAEQPIK

SEQ ID NO: 15280 - protein, 15 aa, Homo sapiens
AANSLEAFIFETQDK

SEQ ID NO: 15281 - protein, 7 aa, Homo sapiens
YPDYESK

SEQ ID NO: 15282 - protein, 21 aa, Homo sapiens
LYQPEYQEVSTEEQREEISGK

SEQ ID NO: 15283 - protein, 8 aa, Homo sapiens
RPLKNDEL

SEQ ID NO: 15284 - protein, 12 aa, Homo sapiens
EVEEEPGIHSLK

SEQ ID NO: 15285 - protein, 16 aa, Homo sapiens
AEAGPEGVAPAPEGEK

SEQ ID NO: 15286 - protein, 21 aa, Homo sapiens
VESVFETLVEDSAEEESTLTK

SEQ ID NO: 15287 - protein, 27 aa, Homo sapiens
SLAEDFAEQPIKDAVITVPVFFNQAER

SEQ ID NO: 15288 - protein, 8 aa, Homo sapiens
YFQHLLGK

SEQ ID NO: 15289 - protein, 7 aa, Homo sapiens
VQEVLLK

SEQ ID NO: 15290 - protein, 8 aa, Homo sapiens
TPVIVTLK

SEQ ID NO: 15291 - protein, 18 aa, Homo sapiens
LGNTISSLFGGGTTPDAK

SEQ ID NO: 15292 - protein, 15 aa, Homo sapiens
AHFNLDESGVLSLDR

SEQ ID NO: 15293 - protein, 7 aa, Homo sapiens
AVLQAAR

SEQ ID NO: 15294 - protein, 15 aa, Homo sapiens
DAVITVPVFFNQAER

SEQ ID NO: 15295 - protein, 13 aa, Homo sapiens
DAVVYPILVEFTR

SEQ ID NO: 15296 - protein, 11 aa, Homo sapiens
EAGMQPQLQIR

SEQ ID NO: 15297 - protein, 12 aa, Homo sapiens
FPEHELTFDPQR

SEQ ID NO: 15298 - protein, 8 aa, Homo sapiens
GVGDSFKK

SEQ ID NO: 15299 - protein, 9 aa, Homo sapiens
LAGLFNEQR

SEQ ID NO: 15300 - protein, 8 aa, Homo sapiens
LCQGLFFR

SEQ ID NO: 15301 - protein, 7 aa, Homo sapiens
LQDLTLR

SEQ ID NO: 15302 - protein, 15 aa, Homo sapiens
LYQPEYQEVSTEEQR

SEQ ID NO: 15303 - protein, 7 aa, Homo sapiens
MGPYPQR

SEQ ID NO: 15304 - protein, 13 aa, Homo sapiens
QADNPHVALYQAR

SEQ ID NO: 15305 - protein, 8 aa, Homo sapiens
RAVLQAAR

SEQ ID NO: 15306 - protein, 10 aa, Homo sapiens
TLGGLEMELR

SEQ ID NO: 15307 - protein, 13 aa, Homo sapiens
VEFEELCADLFER

SEQ ID NO: 15308 - protein, 19 aa, Homo sapiens
VLQLINDNTATALSYGVFR

SEQ ID NO: 15309 - protein, 23 aa, Homo sapiens
YSHDFNFHINYGDLGFLGPEDLR

SEQ ID NO: 15310 - protein, 14 aa, Homo sapiens
ILDSVEDNYIVLNK

SEQ ID NO: 15311 - protein, 12 aa, Homo sapiens
TIDSVTSAQELR

SEQ ID NO: 15312 - protein, 11 aa, Homo sapiens
LGLQCIGMHEK

SEQ ID NO: 15313 - protein, 16 aa, Homo sapiens
SIGEWFGPNTVAQVLK

SEQ ID NO: 15314 - protein, 11 aa, Homo sapiens
LELAFEYLMSK

SEQ ID NO: 15315 - protein, 21 aa, Homo sapiens
VLVNVLTSDQTEDVLEAVAAK

SEQ ID NO: 15316 - protein, 12 aa, Homo sapiens
LFSLTPAEVEQR

SEQ ID NO: 15317 - protein, 7 aa, Homo sapiens
LPGQQLR

SEQ ID NO: 15318 - protein, 11 aa, Homo sapiens
MHFSIPETESR

SEQ ID NO: 15319 - protein, 16 aa, Homo sapiens
QDPLLGSSETFNSFLR

SEQ ID NO: 15320 - protein, 12 aa, Homo sapiens
SPPLLESPDATR

SEQ ID NO: 15321 - protein, 16 aa, Homo sapiens
VGLNLLYAQTVSDIER

SEQ ID NO: 15322 - protein, 17 aa, Homo sapiens
VTSSVPLPSGSTSSPGR

SEQ ID NO: 15323 - protein, 8 aa, Homo sapiens
AAIQALRK

SEQ ID NO: 15324 - protein, 12 aa, Homo sapiens
GFEPTLEALFGK

SEQ ID NO: 15325 - protein, 15 aa, Homo sapiens
IEGNLIFDPNNYLPK

SEQ ID NO: 15326 - protein, 11 aa, Homo sapiens
TEVIPPLIENR

SEQ ID NO: 15327 - protein, 17 aa, Homo sapiens
ETIGKFFQADIAENALK

SEQ ID NO: 15328 - protein, 27 aa, Homo sapiens
KNQFQAFTQPATDGLSEPDVFAIAPFR

SEQ ID NO: 15329 - protein, 18 aa, Homo sapiens
TTELPAADPFALAPFPSK

SEQ ID NO: 15330 - protein, 16 aa, Homo sapiens
SSMAPSQPEESDVFLR

SEQ ID NO: 15331 - protein, 12 aa, Homo sapiens
TQNNLESDYLAR

SEQ ID NO: 15332 - protein, 17 aa, Homo sapiens
VLNTGSDVEEAVADALK

SEQ ID NO: 15333 - protein, 12 aa, Homo sapiens
FTVDQTQTPSLK

SEQ ID NO: 15334 - protein, 10 aa, Homo sapiens
ASSLPGSLQR

SEQ ID NO: 15335 - protein, 10 aa, Homo sapiens
GIHDADAEAR

SEQ ID NO: 15336 - protein, 16 aa, Homo sapiens
SFQPLGPGYGISQSSR

SEQ ID NO: 15337 - protein, 16 aa, Homo sapiens
VLTTTALSTVSSGVQR

SEQ ID NO: 15338 - protein, 28 aa, Homo sapiens
ALIESLNQKPQTAGDQPPPTDTTHATHR

SEQ ID NO: 15339 - protein, 14 aa, Homo sapiens
AIGTAYAVLSNPEK

SEQ ID NO: 15340 - protein, 14 aa, Homo sapiens
FNWYVDGVEVHNAK

SEQ ID NO: 15341 - protein, 17 aa, Homo sapiens
TTPPVLDSDGSFFLYSK

SEQ ID NO: 15342 - protein, 26 aa, Homo sapiens
THTCPPCPAPELLGGPSVFLFPPKPK

SEQ ID NO: 15343 - protein, 7 aa, Homo sapiens
GLEWVGR

SEQ ID NO: 15344 - protein, 16 aa, Homo sapiens
ESGATIPSFMNIIPTK

SEQ ID NO: 15345 - protein, 17 aa, Homo sapiens
GPYPLGIDPIWNLATNR

SEQ ID NO: 15346 - protein, 15 aa, Homo sapiens
VIEHIMEDLDTNADK

SEQ ID NO: 15347 - protein, 15 aa, Homo sapiens
NIETIINTFHQYSVK

SEQ ID NO: 15348 - protein, 13 aa, Homo sapiens
LGHPDTLNQGEFK

SEQ ID NO: 15349 - protein, 19 aa, Homo sapiens
EGLPVNNIFQQISPVVGDK

SEQ ID NO: 15350 - protein, 12 aa, Homo sapiens
IDTEILPSLFMR

SEQ ID NO: 15351 - protein, 16 aa, Homo sapiens
MEPAEQPSELVSAEGR

SEQ ID NO: 15352 - protein, 9 aa, Homo sapiens
NSFYVALER

SEQ ID NO: 15353 - protein, 11 aa, Homo sapiens
VLQPGTALFSR

SEQ ID NO: 15354 - protein, 12 aa, Homo sapiens
LGDPLEAFPVFK

SEQ ID NO: 15355 - protein, 11 aa, Homo sapiens
QGLISAAQYYK

SEQ ID NO: 15356 - protein, 9 aa, Homo sapiens
AYLVPENFR

SEQ ID NO: 15357 - protein, 12 aa, Homo sapiens
DDDFPSLQAIAR

SEQ ID NO: 15358 - protein, 11 aa, Homo sapiens
MQGDPDDTSHR

SEQ ID NO: 15359 - protein, 9 aa, Homo sapiens
QLLQHECPR

SEQ ID NO: 15360 - protein, 16 aa, Homo sapiens
RNEGVVGGEDYEEVDR

SEQ ID NO: 15361 - protein, 12 aa, Homo sapiens
MEPQVTLNVTFK

SEQ ID NO: 15362 - protein, 14 aa, Homo sapiens
FMPIPMYDASQALK

SEQ ID NO: 15363 - protein, 18 aa, Homo sapiens
ALEEVPIHIEDPPFPSLR

SEQ ID NO: 15364 - protein, 11 aa, Homo sapiens
DGQSSPQPSPR

SEQ ID NO: 15365 - protein, 14 aa, Homo sapiens
GSESHELNEGGDEK

SEQ ID NO: 15366 - protein, 12 aa, Homo sapiens
FLASVSTVLTSK

SEQ ID NO: 15367 - protein, 15 aa, Homo sapiens
VGAHAGEYGAEALER

SEQ ID NO: 15368 - protein, 11 aa, Homo sapiens
SIIGMIDMFHK

SEQ ID NO: 15369 - protein, 12 aa, Homo sapiens
ENFPNFLSACDK

SEQ ID NO: 15370 - protein, 11 aa, Homo sapiens
GTNYLADVFEK

SEQ ID NO: 15371 - protein, 12 aa, Homo sapiens
MQEIIASVDHIK

SEQ ID NO: 15372 - protein, 9 aa, Homo sapiens
GHLAFLSGQ

SEQ ID NO: 15373 - protein, 18 aa, Homo sapiens
TPQVIGVMQSQNSSAGNR

SEQ ID NO: 15374 - protein, 12 aa, Homo sapiens
SQQENPESQPQK

SEQ ID NO: 15375 - protein, 7 aa, Homo sapiens
AYHAGLK

SEQ ID NO: 15376 - protein, 18 aa, Homo sapiens
ALVSGKPAESSAVAATEK

SEQ ID NO: 15377 - protein, 10 aa, Homo sapiens
FYTIEILKVE

SEQ ID NO: 15378 - protein, 15 aa, Homo sapiens
ELGICPDDAAVIPIK

SEQ ID NO: 15379 - protein, 16 aa, Homo sapiens
TYLISSIPLQGAFNYK

SEQ ID NO: 15380 - protein, 12 aa, Homo sapiens
TVQIAAVVDVIR

SEQ ID NO: 15381 - protein, 11 aa, Homo sapiens
YTACLCDDNPK

SEQ ID NO: 15382 - protein, 26 aa, Homo sapiens
SPPGKPQGPPPQGGNQPQGPPPPPGK

SEQ ID NO: 15383 - protein, 10 aa, Homo sapiens
CLAYDFYPGK

SEQ ID NO: 15384 - protein, 12 aa, Homo sapiens
QKWEAEPVYVQR

SEQ ID NO: 15385 - protein, 17 aa, Homo sapiens
QDPPSVVVTSHQAPGEK

SEQ ID NO: 15386 - protein, 16 aa, Homo sapiens
EIPAWVPFDPAAQITK

SEQ ID NO: 15387 - protein, 12 aa, Homo sapiens
YSLTYIYTGLSK

SEQ ID NO: 15388 - protein, 10 aa, Homo sapiens
AGEVQEPELR

SEQ ID NO: 15389 - protein, 12 aa, Homo sapiens
AYLEEECPATLR

SEQ ID NO: 15390 - protein, 21 aa, Homo sapiens
HVEDVPAFQALGSLNDLQFFR

SEQ ID NO: 15391 - protein, 7 aa, Homo sapiens
SSGAFWK

SEQ ID NO: 15392 - protein, 10 aa, Homo sapiens
WEAEPVYVQR

SEQ ID NO: 15393 - protein, 13 aa, Homo sapiens
YYYDGKDYIEFNK

SEQ ID NO: 15394 - protein, 15 aa, Homo sapiens
KCSTSPLLEACEFLR

SEQ ID NO: 15395 - protein, 12 aa, Homo sapiens
RSDTSLTWNSVK

SEQ ID NO: 15396 - protein, 10 aa, Homo sapiens
THYYAVAVVK

SEQ ID NO: 15397 - protein, 13 aa, Homo sapiens
VVWCAVGEQELRK

SEQ ID NO: 15398 - protein, 9 aa, Homo sapiens
FCLFQSETK

SEQ ID NO: 15399 - protein, 14 aa, Homo sapiens
YLGPQYVAGITNLK

SEQ ID NO: 15400 - protein, 20 aa, Homo sapiens
ADAVTLDGGFIYEAGLAPYK

SEQ ID NO: 15401 - protein, 15 aa, Homo sapiens
YLGPQYVAGITNLKK

SEQ ID NO: 15402 - protein, 17 aa, Homo sapiens
CAFSSQEPYFSYSGAFK

SEQ ID NO: 15403 - protein, 12 aa, Homo sapiens
LADFALLCLDGK

SEQ ID NO: 15404 - protein, 16 aa, Homo sapiens
SNLCALCIGDEQGENK

SEQ ID NO: 15405 - protein, 18 aa, Homo sapiens
GEADAMSLDGGYVYTAGK

SEQ ID NO: 15406 - protein, 11 aa, Homo sapiens
SDTSLTWNSVK

SEQ ID NO: 15407 - protein, 12 aa, Homo sapiens
FFSASCVPGADK

SEQ ID NO: 15408 - protein, 11 aa, Homo sapiens
FQLFGSPSGQK

SEQ ID NO: 15409 - protein, 13 aa, Homo sapiens
CLAENAGDVAFVK

SEQ ID NO: 15410 - protein, 14 aa, Homo sapiens
CSTSPLLEACEFLR

SEQ ID NO: 15411 - protein, 10 aa, Homo sapiens
DGAGDVAFIR

SEQ ID NO: 15412 - protein, 8 aa, Homo sapiens
DSAIGFSR

SEQ ID NO: 15413 - protein, 14 aa, Homo sapiens
DSPIQCIQAIAENR

SEQ ID NO: 15414 - protein, 18 aa, Homo sapiens
DVTVLQNTDGNNNEAWAK

SEQ ID NO: 15415 - protein, 9 aa, Homo sapiens
EDAIWNLLR

SEQ ID NO: 15416 - protein, 26 aa, Homo sapiens
ESTVFEDLSDEAERDEYELLCPDNTR

SEQ ID NO: 15417 - protein, 16 aa, Homo sapiens
FDEYFSQSCAPGSDPR

SEQ ID NO: 15418 - protein, 20 aa, Homo sapiens
FFSASCVPGADKGQFPNLCR

SEQ ID NO: 15419 - protein, 13 aa, Homo sapiens
GGSFQLNELQGLK

SEQ ID NO: 15420 - protein, 19 aa, Homo sapiens
IDSGLYLGSGYFTAIQNLR

SEQ ID NO: 15421 - protein, 14 aa, Homo sapiens
KGGSFQLNELQGLK

SEQ ID NO: 15422 - protein, 13 aa, Homo sapiens
LADFALLCLDGKR

SEQ ID NO: 15423 - protein, 11 aa, Homo sapiens
LKQVLLHQQAK

SEQ ID NO: 15424 - protein, 13 aa, Homo sapiens
LRPVAAEVYGTER

SEQ ID NO: 15425 - protein, 17 aa, Homo sapiens
NGSDCPDKFCLFQSETK

SEQ ID NO: 15426 - protein, 13 aa, Homo sapiens
NLLFNDNTECLAR

SEQ ID NO: 15427 - protein, 15 aa, Homo sapiens
SCHLAMAPNHAVVSR

SEQ ID NO: 15428 - protein, 26 aa, Homo sapiens
SQQSSDPDPNCVDRPVEGYLAVAVVR

SEQ ID NO: 15429 - protein, 14 aa, Homo sapiens
SVNGKEDAIWNLLR

SEQ ID NO: 15430 - protein, 12 aa, Homo sapiens
TAGWNVPIGTLR

SEQ ID NO: 15431 - protein, 9 aa, Homo sapiens
VPSHAVVAR

SEQ ID NO: 15432 - protein, 12 aa, Homo sapiens
VVWCAVGEQELR

SEQ ID NO: 15433 - protein, 12 aa, Homo sapiens
FLEQQNQVLETK

SEQ ID NO: 15434 - protein, 16 aa, Homo sapiens
GTYIPVPIVSELQSGK

SEQ ID NO: 15435 - protein, 13 aa, Homo sapiens
MYVAVWTPYGVLR

SEQ ID NO: 15436 - protein, 19 aa, Homo sapiens
RFSDQAAGPAIPTSNSYSK

SEQ ID NO: 15437 - protein, 9 aa, Homo sapiens
STFHAGQLR

SEQ ID NO: 15438 - protein, 17 aa, Homo sapiens
TTPTPSTNSVLSTSTNR

SEQ ID NO: 15439 - protein, 12 aa, Homo sapiens
TTSSMEPNEMMR

SEQ ID NO: 15440 - protein, 17 aa, Homo sapiens
IVTENIPCGTTGTTCSK

SEQ ID NO: 15441 - protein, 14 aa, Homo sapiens
LYDLHGDCSYVLSK

SEQ ID NO: 15442 - protein, 13 aa, Homo sapiens
TGLLVEQSGDYIK

SEQ ID NO: 15443 - protein, 23 aa, Homo sapiens
TCGLCGDFNGMPVVSELLSHNTK

SEQ ID NO: 15444 - protein, 19 aa, Homo sapiens
NPSGHCLVDLPGLEGCYPK

SEQ ID NO: 15445 - protein, 15 aa, Homo sapiens
GATGGLCDLTCPPTK

SEQ ID NO: 15446 - protein, 18 aa, Homo sapiens
EEGLILFDQIPVSSGFSK

SEQ ID NO: 15447 - protein, 14 aa, Homo sapiens
SVVGDALEFGNSWK

SEQ ID NO: 15448 - protein, 16 aa, Homo sapiens
AAGGAVCEQPLGLECR

SEQ ID NO: 15449 - protein, 11 aa, Homo sapiens
AAGGHLCQQPK

SEQ ID NO: 15450 - protein, 31 aa, Homo sapiens
ACEDHCVAGCFCPEGTVLDDIGQTGCVPVSK

SEQ ID NO: 15451 - protein, 17 aa, Homo sapiens
AGCHFYAVCNQHCDIDR

SEQ ID NO: 15452 - protein, 27 aa, Homo sapiens
AQAQPGVPLGELGQVVECSLDFGLVCR

SEQ ID NO: 15453 - protein, 10 aa, Homo sapiens
AQAQPGVPLR

SEQ ID NO: 15454 - protein, 11 aa, Homo sapiens
CGLTDNENCLK

SEQ ID NO: 15455 - protein, 14 aa, Homo sapiens
CPTCPCATFVEYSR

SEQ ID NO: 15456 - protein, 13 aa, Homo sapiens
CQWTEWFDEDYPK

SEQ ID NO: 15457 - protein, 20 aa, Homo sapiens
CVAQCGCYDKDGNYYDVGAR

SEQ ID NO: 15458 - protein, 9 aa, Homo sapiens
DPCTANPFR

SEQ ID NO: 15459 - protein, 17 aa, Homo sapiens
ELGQVVECSLDFGLVCR

SEQ ID NO: 15460 - protein, 14 aa, Homo sapiens
FPGLCNYVFSEHCR

SEQ ID NO: 15461 - protein, 20 aa, Homo sapiens
GLMCANSQQSPPLCHDYELR

SEQ ID NO: 15462 - protein, 11 aa, Homo sapiens
GLVGSRPVVTR

SEQ ID NO: 15463 - protein, 19 aa, Homo sapiens
GQTCGLCGNFNSIQADDFR

SEQ ID NO: 15464 - protein, 18 aa, Homo sapiens
GRLEVPCQSLEAYAELCR

SEQ ID NO: 15465 - protein, 14 aa, Homo sapiens
GYQVCPVLADIECR

SEQ ID NO: 15466 - protein, 16 aa, Homo sapiens
KTGCCYSCEEDSCQVR

SEQ ID NO: 15467 - protein, 10 aa, Homo sapiens
LSCLGASLQK

SEQ ID NO: 15468 - protein, 12 aa, Homo sapiens
LSPSCPDALAPK

SEQ ID NO: 15469 - protein, 10 aa, Homo sapiens
LTDPNSAFSR

SEQ ID NO: 15470 - protein, 11 aa, Homo sapiens
LTPLQFGNLQK

SEQ ID NO: 15471 - protein, 8 aa, Homo sapiens
MCFNYEIR

SEQ ID NO: 15472 - protein, 18 aa, Homo sapiens
NSFEDPCSLSVENENYAR

SEQ ID NO: 15473 - protein, 9 aa, Homo sapiens
NWEQEGVFK

SEQ ID NO: 15474 - protein, 15 aa, Homo sapiens
PFHSNCMFDTCNCER

SEQ ID NO: 15475 - protein, 14 aa, Homo sapiens
QCSILHGPTFAACR

SEQ ID NO: 15476 - protein, 19 aa, Homo sapiens
SEDCLCAALSSYVHACAAK

SEQ ID NO: 15477 - protein, 13 aa, Homo sapiens
SEQLGGDVESYDK

SEQ ID NO: 15478 - protein, 14 aa, Homo sapiens
SPCADTCSNQEHSR

SEQ ID NO: 15479 - protein, 11 aa, Homo sapiens
SQESAAPTLSR

SEQ ID NO: 15480 - protein, 24 aa, Homo sapiens
TCPLNMQHQECGSPCTDTCSNPQR

SEQ ID NO: 15481 - protein, 8 aa, Homo sapiens
TFDGDVFR

SEQ ID NO: 15482 - protein, 29 aa, Homo sapiens
TLLGPAFAECHALVDSTAYLAACAQDLCR

SEQ ID NO: 15483 - protein, 19 aa, Homo sapiens
VCGLCGNFDDNAINDFATR

SEQ ID NO: 15484 - protein, 12 aa, Homo sapiens
VHCDVHFGLVCR

SEQ ID NO: 15485 - protein, 10 aa, Homo sapiens
VLCCSDDHCR

SEQ ID NO: 15486 - protein, 16 aa, Homo sapiens
VYKPCGPIQPATCNSR

SEQ ID NO: 15487 - protein, 26 aa, Homo sapiens
WSCQEVPCPGTCSVLGGAHFSTFDGK

SEQ ID NO: 15488 - protein, 13 aa, Homo sapiens
YAYVVDACQPTCR

SEQ ID NO: 15489 - protein, 12 aa, Homo sapiens
DAQVPIILAVNK

SEQ ID NO: 15490 - protein, 12 aa, Homo sapiens
LVEDLQEELSSR

SEQ ID NO: 15491 - protein, 8 aa, Homo sapiens
NQAILDLK

SEQ ID NO: 15492 - protein, 10 aa, Homo sapiens
AAGWSELSER

SEQ ID NO: 15493 - protein, 9 aa, Homo sapiens
KQCPCDHFK

SEQ ID NO: 15494 - protein, 9 aa, Homo sapiens
FMTVSGLPK

SEQ ID NO: 15495 - protein, 18 aa, Homo sapiens
GSVTFHCALGPEVANVAK

SEQ ID NO: 15496 - protein, 19 aa, Homo sapiens
NADLQVLKPEPELVYEDLR

SEQ ID NO: 15497 - protein, 8 aa, Homo sapiens
VPCHFPCK

SEQ ID NO: 15498 - protein, 16 aa, Homo sapiens
GGCITLISSEGYVSSK

SEQ ID NO: 15499 - protein, 9 aa, Homo sapiens
TVTINCPFK

SEQ ID NO: 15500 - protein, 19 aa, Homo sapiens
LSDAGQYLCQAGDDSNSNK

SEQ ID NO: 15501 - protein, 16 aa, Homo sapiens
QSSGENCDVVVNTLGK

SEQ ID NO: 15502 - protein, 11 aa, Homo sapiens
ADEGWYWCGVK

SEQ ID NO: 15503 - protein, 10 aa, Homo sapiens
AFVNCDENSR

SEQ ID NO: 15504 - protein, 16 aa, Homo sapiens
ASVDSGSSEEQGGSSR

SEQ ID NO: 15505 - protein, 12 aa, Homo sapiens
DGSFSVVITGLR

SEQ ID NO: 15506 - protein, 15 aa, Homo sapiens
GVAGGSVAVLCPYNR

SEQ ID NO: 15507 - protein, 9 aa, Homo sapiens
IIEGEPNLK

SEQ ID NO: 15508 - protein, 20 aa, Homo sapiens
ILLNPQDKDGSFSVVITGLR

SEQ ID NO: 15509 - protein, 20 aa, Homo sapiens
LSDAGQYLCQAGDDSNSNKK

SEQ ID NO: 15510 - protein, 8 aa, Homo sapiens
RAPAFEGR

SEQ ID NO: 15511 - protein, 7 aa, Homo sapiens
VLDSGFR

SEQ ID NO: 15512 - protein, 8 aa, Homo sapiens
VYTVDLGR

SEQ ID NO: 15513 - protein, 18 aa, Homo sapiens
WNNTGCQALPSQDEGPSK

SEQ ID NO: 15514 - protein, 32 aa, Homo sapiens
YLCGAHSDGQLQEGSPIQAWQLFVNEESTIPR

SEQ ID NO: 15515 - protein, 12 aa, Homo sapiens
YWCLWEGAQNGR

SEQ ID NO: 15516 - protein, 15 aa, Homo sapiens
YKKPECQSDWQCPGK

SEQ ID NO: 15517 - protein, 25 aa, Homo sapiens
CPVTYGQCLMLNPPNFCEMDGQCKR

SEQ ID NO: 15518 - protein, 30 aa, Homo sapiens
KVASGVLSPPPAAPPPSSSSVPEAGGPPIK

SEQ ID NO: 15519 - protein, 24 aa, Homo sapiens
CPVTYGQCLMLNPPNFCEMDGQCK

SEQ ID NO: 15520 - protein, 7 aa, Homo sapiens
AGVCPPK

SEQ ID NO: 15521 - protein, 8 aa, Homo sapiens
CCMGMCGK

SEQ ID NO: 15522 - protein, 12 aa, Homo sapiens
CLDPVDTPNPTR

SEQ ID NO: 15523 - protein, 13 aa, Homo sapiens
KPECQSDWQCPGK

SEQ ID NO: 15524 - protein, 14 aa, Homo sapiens
SVVGDVLEFGNSWK

SEQ ID NO: 15525 - protein, 24 aa, Homo sapiens
WFDVDFPSPGPHGGDKETYNNIIR

SEQ ID NO: 15526 - protein, 9 aa, Homo sapiens
NQDQQGPFK

SEQ ID NO: 15527 - protein, 29 aa, Homo sapiens
AESFPNTPLADLGQDVICSHTEGLICLNK

SEQ ID NO: 15528 - protein, 20 aa, Homo sapiens
AESHPEVNIEHLGQVVQCSR

SEQ ID NO: 15529 - protein, 20 aa, Homo sapiens
AESHPEVSIEHLGQVVQCSR

SEQ ID NO: 15530 - protein, 13 aa, Homo sapiens
EQASGLCYNYQIR

SEQ ID NO: 15531 - protein, 20 aa, Homo sapiens
GNCGDSSSMYSLEGNTVEHR

SEQ ID NO: 15532 - protein, 14 aa, Homo sapiens
GTDSGDFDTLENLR

SEQ ID NO: 15533 - protein, 9 aa, Homo sapiens
IFLGGFELK

SEQ ID NO: 15534 - protein, 11 aa, Homo sapiens
IQCCETVNVCR

SEQ ID NO: 15535 - protein, 23 aa, Homo sapiens
LSCIGGQAPAPVCAAPMVFFDCR

SEQ ID NO: 15536 - protein, 8 aa, Homo sapiens
MCLNYEVR

SEQ ID NO: 15537 - protein, 15 aa, Homo sapiens
NSFEDPCSLSVENEK

SEQ ID NO: 15538 - protein, 21 aa, Homo sapiens
QCSILHGPTFAACHAHVEPAR

SEQ ID NO: 15539 - protein, 18 aa, Homo sapiens
SHPEVSIEHLGQVVQCSR

SEQ ID NO: 15540 - protein, 10 aa, Homo sapiens
SIILEYHQDR

SEQ ID NO: 15541 - protein, 19 aa, Homo sapiens
VCGLCGNFDDIAVNDFATR

SEQ ID NO: 15542 - protein, 8 aa, Homo sapiens
VLCCETPR

SEQ ID NO: 15543 - protein, 12 aa, Homo sapiens
VQCSPDVGLTCR

SEQ ID NO: 15544 - protein, 17 aa, Homo sapiens
VVTENVPCGTTGTTCSK

SEQ ID NO: 15545 - protein, 15 aa, Homo sapiens
GTTVTVSSASPTSPK

SEQ ID NO: 15546 - protein, 11 aa, Homo sapiens
AEDTAVYYCAK

SEQ ID NO: 15547 - protein, 19 aa, Homo sapiens
EVQLLESGGGLVQPGGSLR

SEQ ID NO: 15548 - protein, 11 aa, Homo sapiens
NTLYLQMNSLR

SEQ ID NO: 15549 - protein, 19 aa, Homo sapiens
KSDLEANVEALTQEIDFLR

SEQ ID NO: 15550 - protein, 7 aa, Homo sapiens
LQFFQNR

SEQ ID NO: 15551 - protein, 18 aa, Homo sapiens
IPGVPWCFKPLQEAECTF

SEQ ID NO: 15552 - protein, 19 aa, Homo sapiens
AAPSVTLFPPSSEELQANK

SEQ ID NO: 15553 - protein, 10 aa, Homo sapiens
AGVETTTPSK

SEQ ID NO: 15554 - protein, 15 aa, Homo sapiens
DASGATFTWTPSSGK

SEQ ID NO: 15555 - protein, 25 aa, Homo sapiens
HYTNPSQDVTVPCPVPPPPPCCHPR

SEQ ID NO: 15556 - protein, 13 aa, Homo sapiens
FSGSGSGTDFTLK

SEQ ID NO: 15557 - protein, 18 aa, Homo sapiens
SLPGQNEDLVLTGYQVDK

SEQ ID NO: 15558 - protein, 20 aa, Homo sapiens
GDTFSCMVGHEALPLAFTQK

SEQ ID NO: 15559 - protein, 15 aa, Homo sapiens
DASGVTFTWTPSSGK

SEQ ID NO: 15560 - protein, 23 aa, Homo sapiens
DLCGCYSVSSVLPGCAEPWNHGK

SEQ ID NO: 15561 - protein, 12 aa, Homo sapiens
TFTCTAAYPESK

SEQ ID NO: 15562 - protein, 9 aa, Homo sapiens
TPLTATLSK

SEQ ID NO: 15563 - protein, 21 aa, Homo sapiens
KGDTFSCMVGHEALPLAFTQK

SEQ ID NO: 15564 - protein, 9 aa, Homo sapiens
EKYLTWASR

SEQ ID NO: 15565 - protein, 17 aa, Homo sapiens
QEPSQGTTTFAVTSILR

SEQ ID NO: 15566 - protein, 9 aa, Homo sapiens
SAVQGPPER

SEQ ID NO: 15567 - protein, 32 aa, Homo sapiens
SGNTFRPEVHLLPPPSEELALNELVTLTCLAR

SEQ ID NO: 15568 - protein, 7 aa, Homo sapiens
VAAEDWK

SEQ ID NO: 15569 - protein, 10 aa, Homo sapiens
WLQGSQELPR

SEQ ID NO: 15570 - protein, 7 aa, Homo sapiens
YLTWASR

SEQ ID NO: 15571 - protein, 21 aa, Homo sapiens
KGETFSCMVGHEALPLAFTQK

SEQ ID NO: 15572 - protein, 20 aa, Homo sapiens
GETFSCMVGHEALPLAFTQK

SEQ ID NO: 15573 - protein, 11 aa, Homo sapiens
VPPPPPCCHPR

SEQ ID NO: 15574 - protein, 12 aa, Homo sapiens
LFDEVLDRDVQK

SEQ ID NO: 15575 - protein, 21 aa, Homo sapiens
NDNDNIFLSPLSISTAFAMTK

SEQ ID NO: 15576 - protein, 25 aa, Homo sapiens
DVMEGSAMLIQEAKQALIAPGDAER

SEQ ID NO: 15577 - protein, 14 aa, Homo sapiens
AGELTPEEEAQYKK

SEQ ID NO: 15578 - protein, 23 aa, Homo sapiens
AFSAVDTDGNGTINAQELGAALK

SEQ ID NO: 15579 - protein, 14 aa, Homo sapiens
AALCHFIVDELNAK

SEQ ID NO: 15580 - protein, 9 aa, Homo sapiens
SSIGLINEK

SEQ ID NO: 15581 - protein, 13 aa, Homo sapiens
ALGFEAAESSLTK

SEQ ID NO: 15582 - protein, 15 aa, Homo sapiens
QVMNLLVPSLPNLVK

SEQ ID NO: 15583 - protein, 19 aa, Homo sapiens
DALVLTPASLWKPSSPVSQ

SEQ ID NO: 15584 - protein, 17 aa, Homo sapiens
ILTQDTPEFFIDQGHAK

SEQ ID NO: 15585 - protein, 12 aa, Homo sapiens
AADKLGSTQIVK

SEQ ID NO: 15586 - protein, 26 aa, Homo sapiens
AAVAAVLSPEEFMVLLDSVLPESAHR

SEQ ID NO: 15587 - protein, 19 aa, Homo sapiens
EKPAGGIPVLGSLVNTVLK

SEQ ID NO: 15588 - protein, 11 aa, Homo sapiens
GDTIQLYLGAK

SEQ ID NO: 15589 - protein, 15 aa, Homo sapiens
IPLDMVAGFNTPLVK

SEQ ID NO: 15590 - protein, 17 aa, Homo sapiens
IQLMNSGIGWFQPDVLK

SEQ ID NO: 15591 - protein, 8 aa, Homo sapiens
LGSTQIVK

SEQ ID NO: 15592 - protein, 10 aa, Homo sapiens
LSFLVNALAK

SEQ ID NO: 15593 - protein, 14 aa, Homo sapiens
LVLSDCATSHGSLR

SEQ ID NO: 15594 - protein, 10 aa, Homo sapiens
MDTSASGPTR

SEQ ID NO: 15595 - protein, 9 aa, Homo sapiens
VPISLSIDR

SEQ ID NO: 15596 - protein, 20 aa, Homo sapiens
VDNALQSGNSQESVTEQDSK

SEQ ID NO: 15597 - protein, 14 aa, Homo sapiens
DSTYSLSSTLTLSK

SEQ ID NO: 15598 - protein, 18 aa, Homo sapiens
TVAAPSVFIFPPSDEQLK

SEQ ID NO: 15599 - protein, 17 aa, Homo sapiens
VYACEVTHQGLSSPVTK

SEQ ID NO: 15600 - protein, 16 aa, Homo sapiens
FSGSGSGTDFTLTISR

SEQ ID NO: 15601 - protein, 16 aa, Homo sapiens
SGTASVVCLLNNFYPR

SEQ ID NO: 15602 - protein, 30 aa, Homo sapiens
LDGQISSAYPSQEGQVLVGIYGQYQLLGIK

SEQ ID NO: 15603 - protein, 9 aa, Homo sapiens
VSVGLLLVK

SEQ ID NO: 15604 - protein, 16 aa, Homo sapiens
YFSTTEDYDHEITGLR

SEQ ID NO: 15605 - protein, 10 aa, Homo sapiens
KDVDGAYMTK

SEQ ID NO: 15606 - protein, 8 aa, Homo sapiens
SEIDNVKK

SEQ ID NO: 15607 - protein, 9 aa, Homo sapiens
DYQELMNTK

SEQ ID NO: 15608 - protein, 19 aa, Homo sapiens
NKLNDLEDALQQAKEDLAR

SEQ ID NO: 15609 - protein, 9 aa, Homo sapiens
DVDGAYMTK

SEQ ID NO: 15610 - protein, 9 aa, Homo sapiens
AQYEDIAQK

SEQ ID NO: 15611 - protein, 8 aa, Homo sapiens
YEDEINKR

SEQ ID NO: 15612 - protein, 10 aa, Homo sapiens
AEAESLYQSK

SEQ ID NO: 15613 - protein, 12 aa, Homo sapiens
LNDLEDALQQAK

SEQ ID NO: 15614 - protein, 10 aa, Homo sapiens
NKYEDEINKR

SEQ ID NO: 15615 - protein, 12 aa, Homo sapiens
TNAENEFVTIKK

SEQ ID NO: 15616 - protein, 14 aa, Homo sapiens
NKLNDLEDALQQAK

SEQ ID NO: 15617 - protein, 11 aa, Homo sapiens
TNAENEFVTIK

SEQ ID NO: 15618 - protein, 12 aa, Homo sapiens
SKAEAESLYQSK

SEQ ID NO: 15619 - protein, 12 aa, Homo sapiens
SLNNQFASFIDK

SEQ ID NO: 15620 - protein, 14 aa, Homo sapiens
SLNNQFASFIDKVR

SEQ ID NO: 15621 - protein, 12 aa, Homo sapiens
FLEQQNQVLQTK

SEQ ID NO: 15622 - protein, 12 aa, Homo sapiens
SLDLDSIIAEVK

SEQ ID NO: 15623 - protein, 39 aa, Homo sapiens
GSYGSGGSSYGSGGGSYGSGGGGGGHGSYGSGSSSGGYR

SEQ ID NO: 15624 - protein, 8 aa, Homo sapiens
IEISELNR

SEQ ID NO: 15625 - protein, 11 aa, Homo sapiens
LALDLEIATYR

SEQ ID NO: 15626 - protein, 16 aa, Homo sapiens
LDSELKNMQDMVEDYR

SEQ ID NO: 15627 - protein, 12 aa, Homo sapiens
LLRDYQELMNTK

SEQ ID NO: 15628 - protein, 17 aa, Homo sapiens
LNDLEDALQQAKEDLAR

SEQ ID NO: 15629 - protein, 9 aa, Homo sapiens
LRSEIDNVK

SEQ ID NO: 15630 - protein, 10 aa, Homo sapiens
LRSEIDNVKK

SEQ ID NO: 15631 - protein, 26 aa, Homo sapiens
MSGECAPNVSVSVSTSHTTISGGGSR

SEQ ID NO: 15632 - protein, 9 aa, Homo sapiens
NKYEDEINK

SEQ ID NO: 15633 - protein, 10 aa, Homo sapiens
NMQDMVEDYR

SEQ ID NO: 15634 - protein, 15 aa, Homo sapiens
QISNLQQSISDAEQR

SEQ ID NO: 15635 - protein, 17 aa, Homo sapiens
SGGGFSSGSAGIINYQR

SEQ ID NO: 15636 - protein, 8 aa, Homo sapiens
SISISVAR

SEQ ID NO: 15637 - protein, 9 aa, Homo sapiens
SLVNLGGSK

SEQ ID NO: 15638 - protein, 16 aa, Homo sapiens
THNLEPYFESFINNLR

SEQ ID NO: 15639 - protein, 17 aa, Homo sapiens
THNLEPYFESFINNLRR

SEQ ID NO: 15640 - protein, 9 aa, Homo sapiens
TLLEGEESR

SEQ ID NO: 15641 - protein, 12 aa, Homo sapiens
WELLQQVDTSTR

SEQ ID NO: 15642 - protein, 10 aa, Homo sapiens
YEELQITAGR

SEQ ID NO: 15643 - protein, 11 aa, Homo sapiens
DAVEDLESVGK

SEQ ID NO: 15644 - protein, 14 aa, Homo sapiens
LGKDAVEDLESVGK

SEQ ID NO: 15645 - protein, 11 aa, Homo sapiens
ENAGEDPGLAR

SEQ ID NO: 15646 - protein, 12 aa, Homo sapiens
GISLANWMCLAK

SEQ ID NO: 15647 - protein, 28 aa, Homo sapiens
TPGAVNACHLSCSALLQDNIADAVACAK

SEQ ID NO: 15648 - protein, 7 aa, Homo sapiens
LGMDGYR

SEQ ID NO: 15649 - protein, 8 aa, Homo sapiens
QYVQGCGV

SEQ ID NO: 15650 - protein, 8 aa, Homo sapiens
RLGMDGYR

SEQ ID NO: 15651 - protein, 12 aa, Homo sapiens
STDYGIFQINSR

SEQ ID NO: 15652 - protein, 9 aa, Homo sapiens
VVRDPQGIR

SEQ ID NO: 15653 - protein, 8 aa, Homo sapiens
WESGYNTR

SEQ ID NO: 15654 - protein, 7 aa, Homo sapiens
YWCNDGK

SEQ ID NO: 15655 - protein, 15 aa, Homo sapiens
VTSVIPGLNNIIDIK

SEQ ID NO: 15656 - protein, 11 aa, Homo sapiens
LDITAEILAVR

SEQ ID NO: 15657 - protein, 14 aa, Homo sapiens
LQVNTPLVGASLLR

SEQ ID NO: 15658 - protein, 10 aa, Homo sapiens
LYVTIPLGIK

SEQ ID NO: 15659 - protein, 16 aa, Homo sapiens
PGGGTSGGLLGGLLGK

SEQ ID NO: 15660 - protein, 19 aa, Homo sapiens
VLPELVQGNVCPLVNEVLR

SEQ ID NO: 15661 - protein, 19 aa, Homo sapiens
VTDPQLLELGLVQSPDGHR

SEQ ID NO: 15662 - protein, 13 aa, Homo sapiens
GASEISDSCKPLK

SEQ ID NO: 15663 - protein, 18 aa, Homo sapiens
DVTVLQNTDGNNNDAWAK

SEQ ID NO: 15664 - protein, 12 aa, Homo sapiens
PCGGPHTAVGTK

SEQ ID NO: 15665 - protein, 13 aa, Homo sapiens
IAAWPVSEFFLIR

SEQ ID NO: 15666 - protein, 31 aa, Homo sapiens
KVASGVLSPPPAAPPPSSSSVPEAGGPPIKK

SEQ ID NO: 15667 - protein, 27 aa, Homo sapiens
NKSEDSTKDDIDLDALAAEIEGAGAAK

SEQ ID NO: 15668 - protein, 24 aa, Homo sapiens
KQDFDEDDILKELEELSLEAQGIK

SEQ ID NO: 15669 - protein, 31 aa, Homo sapiens
YGGSVGSQPPPVAPEPGPVPSSPSQEPPTKR

SEQ ID NO: 15670 - protein, 34 aa, Homo sapiens
EPTSSEQGGLEGSGSAAGEGKPALSEEERQEQTK

SEQ ID NO: 15671 - protein, 21 aa, Homo sapiens
GEDAEESLEEEEALDPLGIMR

SEQ ID NO: 15672 - protein, 35 aa, Homo sapiens
LFDDPDLGGAIPLGDSLLLPAACESGGPTPSLSHR

SEQ ID NO: 15673 - protein, 29 aa, Homo sapiens
EPEAAGPVGTEPTVETLEPLGVLFPSTTK

SEQ ID NO: 15674 - protein, 34 aa, Homo sapiens
NQQLKEPEAAGPVGTEPTVETLEPLGVLFPSTTK

SEQ ID NO: 15675 - protein, 24 aa, Homo sapiens
GHTVTEPIQPLEPELPGEGQPEAR

SEQ ID NO: 15676 - protein, 29 aa, Homo sapiens
RAPVQDTEATPGEGTPDGSLPNPGPEPAK

SEQ ID NO: 15677 - protein, 27 aa, Homo sapiens
ALVLDCHYPEDEVGQEDEAESDIFSIR

SEQ ID NO: 15678 - protein, 31 aa, Homo sapiens
GGDGYDGGYGGFDDYGGYNNYGYGNDGFDDR

SEQ ID NO: 15679 - protein, 22 aa, Homo sapiens
MGMGNNYSGGYGTPDGLGGYGR

SEQ ID NO: 15680 - protein, 26 aa, Homo sapiens
APKPEDIDEEDDDVPDLVENFDEASK

SEQ ID NO: 15681 - protein, 22 aa, Homo sapiens
ADPAFGLESSGIAGTTSDEPER

SEQ ID NO: 15682 - protein, 23 aa, Homo sapiens
LLEPSVGSLFGDDEDDDLFSSAK

SEQ ID NO: 15683 - protein, 34 aa, Homo sapiens
SHGLESVPVLPGSGEAGVSFDLPAQADTLHSANK

SEQ ID NO: 15684 - protein, 7 aa, Homo sapiens
LGFEEFK

SEQ ID NO: 15685 - protein, 20 aa, Homo sapiens
VSGALIRPLPSQQMFEHMQK

SEQ ID NO: 15686 - protein, 27 aa, Homo sapiens
ETLPDSGFSANIEDINEADLVRPLLPK

SEQ ID NO: 15687 - protein, 25 aa, Homo sapiens
DGGNPFAEPSELDNPFQDPAVIQHR

SEQ ID NO: 15688 - protein, 24 aa, Homo sapiens
QSTQVMAASMSAFDPLKNQDEINK

SEQ ID NO: 15689 - protein, 36 aa, Homo sapiens
VVEREEAVPEASPVTQAGASVITVETVIQENVGAQK

SEQ ID NO: 15690 - protein, 22 aa, Homo sapiens
TLTAVHDAILEDLVFPSEIVGK

SEQ ID NO: 15691 - protein, 30 aa, Homo sapiens
AGPVVVVAPGPPVTTATSAPVTLVAPGEAR

SEQ ID NO: 15692 - protein, 32 aa, Homo sapiens
CSEGVFLLTTTPRPVIVEPLEQLDDEDGLPEK

SEQ ID NO: 15693 - protein, 32 aa, Homo sapiens
LAEEEDLFDSAHPEEGDLDLASESTAHAQSSK

SEQ ID NO: 15694 - protein, 30 aa, Homo sapiens
APAVAVAPTPVQPPIIVAPVATVPAMPQEK

SEQ ID NO: 15695 - protein, 19 aa, Homo sapiens
LDALSNFHFIPKPPVPEIK

SEQ ID NO: 15696 - protein, 22 aa, Homo sapiens
SPEAPQPVIAMEEPAVPAPLPK

SEQ ID NO: 15697 - protein, 31 aa, Homo sapiens
LFPNSLDQTDMHGDSEYNIMFGPDICGPGTK

SEQ ID NO: 15698 - protein, 37 aa, Homo sapiens
VGGTKPAGGDFGEVLNSAANASATTTEPLPEKTQESL

SEQ ID NO: 15699 - protein, 23 aa, Homo sapiens
AAGEVLEPANLLAEEKDEDLLFE

SEQ ID NO: 15700 - protein, 27 aa, Homo sapiens
EGPGPEDTVQDNLGAAGAEEEQEEHQK

SEQ ID NO: 15701 - protein, 31 aa, Homo sapiens
QEMLLSLKPSEAPELDEDEGFGDWSQRPEQR

SEQ ID NO: 15702 - protein, 32 aa, Homo sapiens
EEASTSLPTKPTQGASSASEPQEAPPKPAEDK

SEQ ID NO: 15703 - protein, 34 aa, Homo sapiens
ATEHPEPPKAELQLPPPPPPGHYGAWAAQELQAK

SEQ ID NO: 15704 - protein, 29 aa, Homo sapiens
LTRPGSSYFNLNPFEVLQIDPEVTDEEIK

SEQ ID NO: 15705 - protein, 29 aa, Homo sapiens
EESFRDPAEVLGTGAEVDYLEQFGTSSFK

SEQ ID NO: 15706 - protein, 28 aa, Homo sapiens
TATSLAEGLSLVVSPDSIHSVAPENEGR

SEQ ID NO: 15707 - protein, 27 aa, Homo sapiens
QVEDLQATFSSIHSFQDLSSSILAQSR

SEQ ID NO: 15708 - protein, 23 aa, Homo sapiens
EDGNEEDKENQGDETQGQQPPQR

SEQ ID NO: 15709 - protein, 27 aa, Homo sapiens
RPQYSNPPVQGEVMEGADNQGAGEQGR

SEQ ID NO: 15710 - protein, 27 aa, Homo sapiens
QFAPIHAEAPEFMEMSVEQEILVTGIK

SEQ ID NO: 15711 - protein, 30 aa, Homo sapiens
GFQQILAGEYDHLPEQAFYMVGPIEEAVAK

SEQ ID NO: 15712 - protein, 37 aa, Homo sapiens
KGSITSVQAIYVPADDLTDPAPATTFAHLDATTVLSR

SEQ ID NO: 15713 - protein, 36 aa, Homo sapiens
GSITSVQAIYVPADDLTDPAPATTFAHLDATTVLSR

SEQ ID NO: 15714 - protein, 30 aa, Homo sapiens
EDKSPSEESAPTTSPESVSGSVPSSGSSGR

SEQ ID NO: 15715 - protein, 35 aa, Homo sapiens
LDQEGDDVQTAAEEVLADGDTLDFEDDTVQSSGPR

SEQ ID NO: 15716 - protein, 20 aa, Homo sapiens
AAQLPDMPLEELGQQVDCDR

SEQ ID NO: 15717 - protein, 30 aa, Homo sapiens
NFPPSQDASGDLYTTSSQLTLPATQCLAGK

SEQ ID NO: 15718 - protein, 21 aa, Homo sapiens
LGALGGNTQEVTLQPGEYITK

SEQ ID NO: 15719 - protein, 20 aa, Homo sapiens
FSSCGGGGGSFGAGGGFGSR

SEQ ID NO: 15720 - protein, 31 aa, Homo sapiens
GGGGGGYGSGGSSYGSGGGSYGSGGGGGGGR

SEQ ID NO: 15721 - protein, 28 aa, Homo sapiens
LGVNNISGIEEVNMFTNQGTVIHFNNPK

SEQ ID NO: 15722 - protein, 7 aa, Homo sapiens
GGGCGGR

SEQ ID NO: 15723 - protein, 15 aa, Homo sapiens
KRCTCNNNNMANAGC

SEQ ID NO: 15724 - protein, 4 aa, Homo sapiens
DEAD

SEQ ID NO: 15725 - protein, 5 aa, Homo sapiens
KLRAQ

SEQ ID NO: 15726 - protein, 4 aa, Homo sapiens
KDEL

SEQ ID NO: 15727 - protein, 5 aa, Homo sapiens
DDRGK
